(19) United States
(12) Patent Application Publication
(10) Pub. No.: US 2023/0183783 A1
(43) Pub. Date: Jun. 15, 2023

(54) IMPROVED DETECTION ASSAYS

(71) Applicant: Sherlock Biosciences, Inc., Watertown, MA (US)

(72) Inventors: William Jeremy Blake, Winchester, MA (US); Xiang Li, Malden, MA (US); Mary Katherine Wilson, Burlington, MA (US); Christine Marie Coticchia, Brookline, MA (US); Brendan John Manning, Brighton, MA (US); Pradeep Ramesh, Brighton, MA (US)

(21) Appl. No.: 17/795,815

(22) PCT Filed: Jan. 27, 2021
(86) PCT No.: PCT/US2021/015306

§ 371 Date: Jul. 27, 2022

Related U.S. Application Data
(60) Provisional application No. 63/139,267, filed on Jan. 19, 2021.
(60) Provisional application No. 63/038,710, filed on Jun. 12, 2020.
(60) Provisional application No. 62/970,159, filed on Feb. 4, 2020.
(60) Provisional application No. 62/967,536, filed on Jan. 29, 2020.
(60) Provisional application No. 62/966,527, filed on Jan. 27, 2020.

(51) Int. Cl. C12Q 1/683; C12N 9/22; C12N 15/113; C12Q 1/6844

(52) U.S. Cl. CPC C12Q 1/683; C12N 9/22; C12N 15/113; C12Q 1/6844; C12N 2310/20; C12N 2320/10

(57) ABSTRACT

The present disclosure provides improved detection (e.g., diagnostic) assays that utilize a Cas protein collateral cleavage activity.

### CROSS REFERENCE TO RELATED APPLICATIONS

[0001] This application claims priority to each of U.S. Provisional Patent Application Nos. 62/966,527; filed Jan. 27, 2020; 62/967,536; filed Jan. 29, 2020; 62/970,159; filed Feb. 4, 2020; 63/038,710; filed Jun. 12, 2020; 63/139,267; filed Jan. 19, 2021 the entire contents of each of which are hereby incorporated by reference.

### BACKGROUND

[0002] A variety of clustered regularly interspaced short palindromic repeats—CRISPR-associated (“Cas”) proteins have been discovered to have a collateral cleavage activity useful in detection (e.g., diagnostic) systems to detect particular nucleic acids of interest. See, for example, review by Sashital Genome Med 2018:10, 32.

### SUMMARY

[0003] The present disclosure provides improved detection (e.g., diagnostic) technologies that utilize Cas-protein collateral activity.

[0004] Among other things, the present disclosure identifies the source of a problem with use of certain Cas enzymes in certain collateral activity assays. For example, the present disclosure documents that certain such assays include a step that involves incubation at an elevated temperature for a period of time, and various Cas enzymes may be insufficiently stable to maintain a sufficient level of activity (e.g., collateral activity) under such conditions. In many embodiments, such a step may be or comprise a nucleic acid extension and/or amplification step.

[0005] Alternatively or additionally, the present disclosure provides the insight that particularly desirable embodiments of various collateral activity assays are those that can be performed in a single reaction vessel (i.e., so-called “one pot”) assays. The present disclosure appreciates that Cas enzymes whose activity (e.g., collateral cleavage activity) is insufficiently stable to maintain sufficient activity through any and all elevated-temperature step(s) (which may be or include, for example, one or more nucleic acid extension and/or amplification step(s)) may not be useful in such one-pot assays. The present disclosure furthermore documents that certain Cas protein(s) (e.g., Cas13 and Cas12) are insufficiently stable at relevant temperature(s), e.g., at temperatures at which nucleic acid extension and/or amplification reactions are typically performed (e.g., above about 60-65° C.).

[0006] The present disclosure encompasses the recognition that thermostable variants of various Cas proteins (e.g., Cas9) have already been described and/or otherwise made publicly available (see, for example, Mougiakos et al. Nat Commun. 8:1647, 2017). Those skilled in the art are able to compare such thermostable variants with related non-thermostable homologs (e.g., orthologs), in order to assess sequence changes and/or elements that may be necessary and/or sufficient to achieve thermostability, and furthermore can identify such sequence changes and/or elements in other homologs (e.g., orthologs) and/or can introduce them thereinto. Still further, those skilled in the art are well aware of potential sources of naturally-occurring thermostable Cas proteins (e.g., in microbes that survive in elevated temperature conditions, such as in sea vents, or are otherwise thermophilic). Thus, those skilled in the art, reading the present disclosure, could readily identify and/or develop appropriate thermostable Cas proteins for use as described herein.

[0007] In some embodiments, a useful thermostable Cas protein is a Cas12 or Cas13 homolog (e.g., ortholog). In some embodiments, a useful thermostable Cas protein is a Cas enzyme comprising an amino acid sequence having 80%, 85%, 90%, 99% or 100% sequence identity to any one of SEQ ID Nos. 1-283.

[0008] Alternatively or additionally, in some embodiments, a useful thermostable Cas protein performs (e.g., its collateral cleavage activity functions sufficiently) at temperatures above about 50° C.; in some embodiments, above a temperature selected from the group consisting of about 55° C., about 56° C., about 57° C., about 58° C., about 59° C., about 60° C., about 61° C., about 62° C., about 63° C., about 64° C., about 65° C., about 66° C., about 67° C., about 68° C., about 69° C., about 70° C., about 71° C., about 72° C., about 73° C., about 74° C., about 75° C., about 76° C., about 77° C., about 78° C., about 79° C., about 80° C., about 81° C., about 82° C., about 83° C., about 84° C., about 85° C., about 86° C., about 87° C., about 88° C., about 89° C., about 90° C., about 91° C., about 92° C., about 93° C., about 94° C., about 95° C., about 96° C., about 97° C., about 98° C., about 99° C., about 100° C., or combinations thereof. In many embodiments, useful thermostable Cas protein performs (e.g., its collateral cleavage activity functions sufficiently) at temperatures above about 60° C.

[0009] In some embodiments, a useful thermostable Cas protein performs (e.g., its collateral cleavage activity functions sufficiently) within a temperature range at which nucleic acid extension and/or amplification reaction(s) are performed; those skilled in the art are well familiar with various such reactions and the temperature ranges at which they are performed, In some embodiments, such a temperature range may be above a temperature selected from the group consisting of about 60° C., about 61° C., about 62° C., about 63° C., about 64° C., 65° C., about 66° C., about 67° C., about 68° C., about 69° C., about 70° C., about 71° C., about 72° C., about 73° C., about 74° C., about 75° C., about 76° C., about 77° C., about 78° C., about 79° C., about 80° C., about 81° C., about 82° C., about 83° C., about 84° C., about 85° C., about 86° C., about 87° C., about 88° C., about 89° C., about 90° C., about 91° C., about 92° C., about 93° C., about 94° C., about 95° C., about 96° C., about 97° C., about 98° C., about 99° C., about 100° C., or combinations thereof. In some embodiments, a temperature range may be about 60° C. to about 90° C. In some embodiments, a temperature range may be about 60° C. to about 80° C. In some embodiments, a temperature range may be about 60° C. to about 75° C. In some embodiments, a temperature range may be about 65° C. to about 90° C. In some embodiments, a temperature range may be about 60° C. to about 80° C. In some embodiments, a temperature range may be about 60° C. to about 75° C.

[0010] Thus, as is set forth herein, in some embodiments, a useful thermostable Cas protein is a Cas12 or Cas13 homolog (e.g., ortholog), e.g., a Cas enzyme comprising an amino acid sequence having 80%, 85%, 90%, 99% or 100% sequence identity to any one of SEQ ID Nos. 1-283 that is thermostable at temperatures above about 50° C., and in some embodiments above about 60° C., for example within and/or above about 60-65° C. Those skilled in the art, reading the present disclosure will particularly appreciate that, in some embodiments, a useful thermostable Cas protein is a Cas12 (e.g., SEQ ID NO 3-21, 33-47, 51-56, 68-178, and 274-283, or a variant thereof, for example having at least 90%, 95%, 99% or greater amino acid sequence identity thereto) or Cas13 (e.g., SEQ ID NO 1-2, 22-32, 48-50, 57-67, 179-273, or a variant thereof, for example having at least 90%, 95%, 99% or greater amino acid sequence identity thereto) whose activity (e.g., whose target binding and collateral cleavage activities) is sufficiently thermostable, for example at temperatures within a range of 60-65° C. to perform in assays as described herein (e.g., in some embodiments, one-pot assays). For example, in some embodiments, sufficient thermostable activity is activity that is reasonably comparable to (e.g., within about 25%) of an appropriate reference thermostable Cas protein (e.g., SEQ ID NO 15) as described herein.

[0011] In some embodiments, the disclosure describes a detection method comprising steps of: contacting a CRISPR-Cas complex comprising: a Cas protein with collateral cleavage activity that is thermostable at temperatures above at least 60-65° C.; and a guide RNA selected or engineered to be complementary to a target sequence; with a sample potentially comprising a nucleic acid of the target sequence.

[0012] In some embodiments, the step of contacting comprises contacting the CRISRP-Cas complex and sample with a reporter susceptible to cleavage by the Cas protein collateral activity. In some embodiments, the step of contacting comprises incubating for a period of time above the temperature. In some embodiments, a detection method further comprises a step of amplifying nucleic acid present in the sample. In some embodiments, the step of amplifying utilizes a thermostable nucleic acid polymerase. In some embodiments, the steps of amplifying and contacting are performed in a single vessel.

[0013] In some embodiments, the Cas protein is a Cas12 protein. In some embodiments, the Cas protein has an amino acid sequence that is at least 80% identical to that of SEQ ID NO: 15. In some embodiments, the Cas protein has an amino acid sequence having at least 80%, sequence identity to any one of SEQ ID Nos. 3-21, 33-47, 51-56, 68-178, and 274-283. In some embodiments, the Cas protein has an amino acid sequence having 80%, sequence identity to any one of SEQ ID Nos. 1-283.

[0014] In some embodiments, in a method of performing a detection assay utilizing a Cas protein with collateral cleavage activity, the improvement that comprises utilizing a Cas protein with thermostable collateral cleavage activity. In some embodiments, the Cas protein is a Cas12 protein. In some embodiments, the Cas protein has an amino acid sequence that is at least 80% identical to that of SEQ ID NO: 15. In some embodiments, the Cas protein has an amino acid sequence having at least 80%, sequence identity to any one of SEQ ID Nos. 3-21, 33-47, 51-56, 68-178, and 274-283. In some embodiments, a method of performing a detection assay is conducted in a single reaction vessel. In some embodiments, the thermostable collateral cleavage activity is thermostable above a temperature of about 60° C. In some embodiments, the thermostable collateral cleavage activity is thermostable above a temperature of about 65° C. In some embodiments, the Cas protein has an amino acid sequence having at least 80% sequence identity to any one of SEQ ID Nos. 1-283.

### BRIEF DESCRIPTION OF THE DRAWING

[0015] FIGS. 1A and 1B document the insight, provided by the present disclosure that certain Cas13 protein(s) are insufficiently stable at relevant temperature(s), e.g., at temperatures at which nucleic acid extension and/or amplification reactions are typically performed (e.g., above about 60-65° C.).

[0016] FIG. 2 documents the insight, provided by the present disclosure that certain Cas12 protein(s) are insufficiently stable at relevant temperature(s), e.g., at temperatures at which nucleic acid extension and/or amplification reactions are typically performed (e.g., above about 60-65° C.).

[0017] FIGS. 3A-3C confirms and further demonstrate the thermostability of TccCas13 collateral activity.

[0018] FIG. 4 displays an exemplary method for discovery and screening of thermostable Cas enzyme candidates (e.g., Cas12 and Cas 13 enzymes)

[0019] FIG. 5 displays an exemplary assessment of Cas12a candidate enzymes by endpoint assay.

[0020] FIG. 6 displays an exemplary assessment of Cas12a candidate enzymes by kinetic assay.

[0021] FIG. 7 displays an exemplary assessment of candidate enzymes at 58° C. by endpoint and kinetic assays.

[0022] FIG. 8 displays an exemplary assessment of candidate enzymes at 60° C. by endpoint and kinetic assays.

[0023] FIG. 9 displays an exemplary assessment of candidate enzymes at 62° C. by endpoint and kinetic assays.

[0024] FIG. 10 displays exemplary assessment of four candidate enzymes that were purified and activity was measured at varying temperatures (e.g., approximately 35° C. to approximately 65° C.).

[0025] FIG. 11 shows exemplary characterization of a subset of enzyme candidates using three different guide and target sets compared to no template control at both 58° C. and 70° C.

[0026] FIG. 12 shows exemplary characterization of a Cas12 candidate enzyme with multiple guide/target pairs at both 52° C. and 58° C.

[0027] FIG. 13 demonstrates kinetic assays for a Cas12a candidate enzyme, RS62, which shows activity at 52° C.

[0028] FIG. 14 displays characterization of Cas13 candidate enzymes by endpoint assay at both 37° C. and 52° C.

[0029] FIG. 15 displays exemplary thermostable Cas12a enzyme, RS9, requires Thermostable Inorganic Pyrophosphatase (TIPP) for amplification. Real time detection of ORF1ab amplification was completed over a range of starting concentrations of ORF1ab (4.5 copies/μL to 4,500 copies/μL in the presence or absence of TIPP

[0030] FIG. 16 demonstrates exemplary thermostable Cas12a enzyme, RS9, is specific for its target and requires TIPP for amplification. Amplification was conducted with a starting concentration of 4,500 copies/μL ORF1ab template and either primers and guides specific to ORF1ab or non-targeting primers with an ORF1ab guide. Each reaction condition was also conducted in the presence or absence of TIPP.

[0031] FIG. 17 demonstrates exemplary thermostable Cas12a enzyme, RS9, displays collateral cleavage activity.

[0032] FIG. 18 demonstrates RS9 collateral cleavage activity compared to known Cas12a, LbaCas12a.

[0033] FIG. 19 demonstrates characterization of exemplary thermostable Cas13a enzyme, TccCas13a. Optimal temperature for TccCas13a activity was determined using a Cas reaction over a range of temperatures. Temperature profiles suggest TccCas13a shows highest activity at approximately 62° C.

[0034] FIG. 20 demonstrates TccCas13a can be activated by RNA, but cannot be activated by ssDNA, even at the highest concentrations of ssDNA.

[0035] FIG. 21 displays TccCas13a activation requires a higher concentration of ssDNA than RNA, similar to that observed for LwaCas13 ssDNA activation. TccCas13a was not activated by ssDNA* at any concentration (10 nM, 100 nM, or 1,000 nM) compared to control.

[0036] FIG. 22 demonstrates that TccCas13a shows increased collateral activity at “NN” sites compared to “UU” sites, while LwaCas13a shows no preference for collateral activity of “NN” sites compared to “UU” sites.

[0037] FIG. 23 demonstrates exemplary characterization of candidate thermostable Cas enzymes, Pal1, Pal2 low MW, Pal2 high MW, and Pal3.

[0038] FIG. 24 demonstrates exemplary Pal1 and Pal2 activity at 56° C.

[0039] FIG. 25 demonstrates exemplary activity of Pal1 at 37° C., 56° C., and 70° C. with different exemplary guides.

[0040] FIG. 26 demonstrates exemplary activity of Pal1 at 56° C. and 70° C. compared to control. These data suggest activity of Pal1 is specific to target DNA.

[0041] FIG. 27 demonstrates exemplary temperature profile of Pal1.

[0042] FIG. 28 demonstrates exemplary activity of Pal2 high MW at 37° C., 56° C., and 70° C. with different exemplary guides.

[0043] FIG. 29 demonstrates exemplary activity of Pal2 high MW at 56° C. compared to control. These data suggest activity of Pal2 high MW is specific to target DNA.

[0044] FIG. 30 demonstrates exemplary temperature profile of Pal2 high MW.

### DETAILED DESCRIPTION OF CERTAIN EMBODIMENTS

### Collateral Activity Assays

[0045] Those skilled in the art are well aware of the burgeoning plethora of useful detection (e.g., diagnostic) assays that have been and are being developed using Cas protein collateral activities. See, for example, Sashital Genome Med 2018:10, 32. Furthermore, those skilled in the art are well aware that a “detailed classification of CRISPR/Cas biosensing systems” based on Cas protein collateral activity has recently been made publicly available. See review by Li et al Trends Biotechnol. 37:730, July 2019.

[0046] Formats of particular interest include Cas13-based (e.g., Cas13a- or Cas13b-based) systems, including those referenced as “SHERLOCK” and/or “HUDSON” systems (see, for example, Gootenberg et al, Science 356:438, 2017; Gootenberg et al, Science 360:339, 2018; Myhrvold et al., Science 360:444, 2018; see also U.S. Ser. No. 10/266,887) and Cas12-based (e.g., Cas12a- or Cas12b-based) systems, including those references as “HOLMES” or “DETECTR” systems (see, for example, Cheng et al. CN patent filing CN107488710A; PCT/CN18/82769 and U.S. Ser. No. 16/631,157; Li et al. Cell Disc. 4:20, 2018; Chen et al. Science 360:436, 2018; Li, L. et al. bioRxiv Published online Jul. 26, 2018. http://dx.doi.org/10.1101/362889; U.S. Ser. No. 10/253,365). Both Cas13a and Cas13b enzymes have been used in SHERLOCK and/or HUDSON systems; similarly both Cas12a and Cas12b.

[0047] As is known in the art, and described in references cited herein, typical detection assays that utilize Cas protein collateral cleavage activity involve contacting an appropriate CRISPR-Cas complex, including a Cas protein with collateral activity and a guide RNA complementary to a target sequence of interest, with a sample that may contain the target sequence. Upon recognition of the target sequence, the Cas protein's collateral activity is activated, so that it cleaves unrelated nucleic acid (DNA or RNA or both, depending on the enzyme). A reporter of the relevant cleavable nucleic acid is provided, appropriately configured (e.g., labeled) so that its cleavage as a result of the activated collateral activity is detectable (e.g., separates a fluorophore from a quencher so that fluorescence becomes detectable, etc).

[0048] In many assays, a target sequence is generated and/or amplified (e.g., copied from RNA to DNA and/or amplified, for example by primer extension, DNA replication (e.g., by polymerase chain reaction) and/or transcription). See, for example, FIGS. 3 and 4 of the above-mentioned Li Review (Li et al Trends Biotechnol. 37:730, July 2019).

[0049] Thus, in many embodiments, a collateral activity assay includes steps of (1) target copying and/or amplification; (2) target binding; and (3) signal release and/or detection.

[0050] Typically, collateral activity assays as described herein are in vitro assays. In some embodiments, they may be cell free assays (e.g., may be substantially free of intact cells, or, in some embodiments, of cell fragments).

[0051] In some embodiments, collateral activity assays as described herein are performed on samples that are or are prepared from biological (e.g., blood, saliva, tears, urine, etc) or environmental (e.g., soil, water, etc) primary samples.

[0052] Thermostable Cas Enzymes

[0053] As described herein, the present disclosure identifies the source of a problem with certain detection (e.g., diagnostic assays) that utilize Cas protein collateral activity, as described above, in that certain Cas proteins with collateral activity are insufficiently stable at relevant temperatures (e.g., at temperatures at which nucleic acid extension and/or amplification are performed). Additionally, The present disclosure further surprisingly demonstrates that, for some proteins, loss of activity upon temperature elevation may be irreversible. This reality increases the significance of the insight, provided by the present disclosure, that Cas proteins with thermostable collateral activity are particularly desirable for use in assays asia described herein. FIGS. 1 and 2 document these findings.

[0054] The present disclosure therefore provides improved detection (e.g., diagnostic) assays that utilize Cas protein collateral activity, which improved assays utilize a thermostable Cas protein (e.g., whose collateral activity is thermostable) as described herein.

[0055] In some embodiments, steps of nucleic acid detection and target binding are performed in a single vessel; in some embodiments, steps of target binding an signal release are performed in a single vessel; in some embodiments, steps of steps of (1) target copying and/or amplification; (2) target binding; and (3) signal release and/or detection are performed in a single vessel; in some embodiments all steps are performed in a single vessel—i.e., provided improved assays are one-pot assays.

[0056] In some embodiments, improved collateral activity assays as described herein are in vitro assays. In some embodiments, they may be cell free assays (e.g., may be substantially free of intact cells, or, in some embodiments, of cell fragments).

[0057] In some embodiments, improved collateral activity assays as described herein are performed on samples that are or are prepared from biological (e.g., blood, saliva, tears, urine, etc) or environmental (e.g., soil, water, etc) primary sample.

[0058] In some embodiments, a Cas enzyme with thermostable collateral cleavage activity is a homolog (e.g., ortholog) of a Cas enzyme that either does not have demonstrable collateral cleavage activity, or has demonstrable collateral cleavage activity but loses such activity above a relevant temperature as described herein.

[0059] In some embodiments, a Cas enzyme with thermostable collateral cleavage activity as described herein is a Cas12 (e.g., Cas12a or Cas12b) enzyme. In some embodiments, a Cas enzyme with thermostable collateral cleavage activity as described herein is a Cas13 (e.g., Cas13a or Cas13b) enzyme.

[0060] In some embodiments, a Cas enzyme with thermostable collateral cleavage activity as described herein is a Cas enzyme comprising an amino acid sequence having 80%, 85%, 90%, 99% or 100% sequence identity to any one of SEQ ID Nos. 1-283. In some embodiments, improved collateral activity assays as described herein are performed using a Cas enzyme comprising an amino acid sequence having 80%, 85%, 90%, 99% or 100% sequence identity to any one of SEQ ID Nos. 1-283.

[0061] Target Nucleic Acid

[0062] Those skilled in the art will immediately appreciate that technologies provided herein are broadly applicable to achieve detection of a wide range of nucleic acids including, for example, nucleic acids from an infectious agent (e.g., a virus, microbe, parasite, etc), nucleic acids indicative of a particular physiological state or condition (e.g., presence or state of a disease, disorder or condition such as, for example, cancer or an inflammatory or metabolic disease, disorder or condition, etc), prenatal nucleic acids, etc.

[0063] In some embodiments, a target nucleic acid is detected by an assay comprising a Cas enzyme as described herein and a cRNA. In some embodiments, the structure of the cRNA can affect the activity of the Cas/cRNA complex. In some embodiments the structure of the Cas/cRNA complex contributes to the thermostability of the Cas collateral activity.

[0064] Typically, provided technologies will be applied to one or more samples to assess presence and/or level of one or more target nucleic acids in the sample. In some embodiments, the sample is a biological sample; in some embodiments, a sample is an environmental sample. In some embodiments, a sample is a crude sample (e.g., a primary sample or a sample that has undergone minimal processing).

[0065] In some embodiments, a sample will be processed (e.g., nucleic acids will be partially or substantially isolated or purified out of a primary sample); in some embodiments, only minimal processing will have been performed (i.e., the sample will be a crude sample).

### EXEMPLIFICATION

### Example 1: Temperature Profile for LwaCas13a

[0066] The thermostability of LwaCas13a was tested. Briefly, labeled RNA target was incubated with Rnase Inhibitor; T7 RNA Polymerase, LwaCas13a, MgCl2 and a cRNA. Individual samples were incubated at various temperatures to determine collateral activity.

[0067] FIG. 1A presents a temperature profile for LwaCas13a collateral activity. As can be seen, low activity was observed above 45° C.; activity was completely abolished about 55° C.

[0068] Further, FIG. 1B presents results of testing the reversibility of loss of LwaCas13a at higher temperatures. LwaCas13a was incubated for 5 minutes at 65° C. (“heat pulse”) while the control group (“no heat pulse”) was incubated at room temperature. The active of both enzymes was then tested at 37° C. The heat pulse group shows no activity. This reality increases the significance of the insight, provided by the present disclosure, that Cas proteins with thermostable collateral activity are particularly desirable for use in assays as described herein.

### Example 2: Temperature Profile for AsCas12a and Lbacas12a

[0069] The thermostability of AsCas12a and Lbacas12a was tested. Briefly, labeled RNA target was incubated with Rnase Inhibitor; T7 RNA Polymerase, AsCas12a or Lbacas12a, MgCl2 and a cRNA. Individual samples were incubated at various temperatures to determine collateral activity.

[0070] FIG. 2 presents temperature profiles for AsCas12a and LbaCas12a. As can be seen, low AsCas12a activity is observed at temperatures greater than 55° C. AsCas12a remains active at 60° C. for ˜5 min. AsCas12a has <10% activity at 65° C. for a few minutes. Further, LbaCas12a activity is significantly diminished at temperatures greater than 55° C.

### Example 3: Exemplary Thermostable Cas Candidates

[0071] The present Example describes certain thermostable Cas13 candidates for use in improved collateral activity assays as described herein.

[0072] In the present Example, it was determined that a Cas13 with collateral activity thermostable within a temperature range of about 62-about 68° C. would be particularly desirable, among other things, in one-pot assays with LAMP pre-amplification.

[0073] We performed a computational search for potentially thermostable Cas candidates and identified:
[0074] 2 Cas13a candidates:

### TccCas13a (Thermoclostridium caenicola)

[0075] Exemplary sequences for use with TccCas13a include, but are not limited to:

(forward DR crRNAs)
(SEQ ID NO.: 284)
Agtgtctttgcaggaaagaacacagatcttgaggg
tcacaactcccatgtaggcggagactgcaacccct
atagtgagtcgtattaatt tc;
and
(reverse complement DR crRNAs)
(SEQ ID NO.: 285)
agtgtctttgcaggaaagaacacagatcttgaggg
ttgcagtctccgcctacatgggagttgtgacccct
atagtgagtcgtattaat ttc;

### ThpCas13a (Thalassospira profundimaris)

[0076] Exemplary sequences for use with ThpCas13a include, but are not limited to:

(forward DR crRNAs)
(SEQ ID NO.: 286)
Tctttgcaggaaagaacacagatcttgaggggtgt
agttcccctcaatttggggatgaacgtcgacccct
atagtgagtcgtattaat ttc;
and
(reverse complement DR crRNAs)
(SEQ ID NO.: 287)
tctttgcaggaaagaacacagatcttgagggtcga
cgttcatccccaaattgaggggaactacaccccct
atagtgagtcgtattaa tttc;

[0077] 4 Cas12b candidates:
   [0078] AacCas12b (Alicyclobacillus acidoterrestris)
   [0079] AkCas12b (Alicyclobacillus kakegawensis)
   [0080] BhCas12b (Bacillus hisashii)
   [0081] LsCas12b (Laceyella sediminis)

[0082] Exemplary sequences for use with AacCas12b include, but are not limited to:

(crRNA)
(SEQ ID NO.: 288)
ttgtgagcggataaacacaggtgccacttctcaga
tttgagaagctcaacgggctttgccacctggaaag
tggccattggcacaccc gttgaaaaattctgtcc
tctagacccctatagtgagtcgtattaatttc

[0083] Exemplary sequences for use with AkCas12b include, but are not limited to:

(crRNA)
(SEQ ID NO.: 289)
Ttccggctcgtatgttgtgtggaattgtgagcgga
gtgccacttctcagaccgctcgccctatagtgagt
cgtattaatttc;
and
(tracrRNA)
(SEQ ID NO.: 290)
cgagcggtcatcttgaagccaacggggtgtttgct
cttggaaagagcacattggcacttcccgttgtcct
cgccgtcctatagacgac ccctatagtgagtcgt
attaatttc

[0084] Exemplary sequences for use with BhCas12b include, but are not limited to:

(crRNA)
(SEQ ID NO.: 291)
aattgtgagcggataaacacaggtgctaatgcctc
ccctatagtgagtcgtattaatttc;
and
(tracrRNA)
(SEQ ID NO.: 292)
gagacatcgtccagcaataggagtttctcacaccc
tgcagcacttatagctagacggttgtcctgaccaa
aagacagaacccctata gtgagtcgtattaattt
c

[0085] Exemplary sequences for use with LsCas12b include, but are not limited to:

(crRNA)
(SEQ ID NO.: 293)
Atggtcatagctgtttcctgtgtttatccgctcag
tgctaatcacatttaattcatctaccctatagtga
gtcgtattaatttc;
and
(tracrRNA)
(SEQ ID NO.: 294)
Gataaataatgtaatcctgtggttgaatggatttt
ttccatccttagcacacgcacagtattctttgccc
tttaggcaaaccctatagtg agtcgtattaattt
c.

[0086] Exemplary sequences of Cas proteins with thermostable collateral activity include those described in Table 1:

Table 1: Exemplary Sequences of Cas Proteins with Thermostable Collateral Activity

| SEQ | | |
|---|---|---|
| ID | | |
| NO. | Cas Enzyme | Putative Sequence |
| 1 | TccCas13a | MKITKRKWGEHHPPLYFYRDEDSGRLLAQNDRKQDYTD |
| | (Thermoclostridium | TLFNDIAQDTFERSLRNRLLKTPEKGDKRFYSNEIVKLVE |
| | caenicola) | KLCQGADVAEIMKSMERNEKLRPKNEKEIKNLKKQLDG |
| | | TLSEYGKRYTAPEGAMTLNDALFYLVEGNPLKQAMAK |
| | | AELGKIREALIKEKENRINRVRYSIKNNKIPLRIQEDGGIT |
| | | PNNDRAAWLLGLMKPADPAKGITDCYPLLGELEEVFDF |
| | | DKLSKTLHEKISRCQGRPRSIAMAVDEALKQYLRELWEK |
| | | SPSRQQDLKYYFQAVQEYFKDNFPIRTKRMGARLRQELL |
| | | KDKTSLSRLLEPKHMANAVRRRLINQSTQMHILYGKLY |
| | | AYCCGEDGRLLVNSETLQRIQVHEAVKKQAMTAVLWSI |
| | | SRLRYFYQFEDGDILSNKNPIKDFRDKFLRDTNKYTHED |
| | | VEACKEKLQDFFPLKELQEKIKEDAKGLQETDNKQADTT |
| | | DFKAIGHIVRDDRKLCNQLLAECVSCIGELRHHIFHYKN |
| | | VTLIQALKRIADKVKPEDLSVLRAIYLLDRRNLKKAFAK |
| | | RISSMNLPLYYREDLLSRIFKKEGTAFFLYSAKIQMTPSFQ |
| | | RVYERGKNLRREFECERMKAEASNGQNGQDGDRLKWF |
| | | RQLAAGDSADTHFNWAVEAYAESAADVENNVEFDTDV |
| | | DAQRALRNLLLLIYRHHFLPEVQKDETLVTGKIHKVLER |
| | | NRQLSEGQGPNQGKAHGYSVIEELYHEGMPLSDLMKQL |
| | | QRRISETERESRELAQEKTDYAQRFILDIFAEAFNDFLEA |
| | | HYGEEYLEIMSPRKDAEAAKKWVKESKTVDLKTSIDEK |
| | | EPEGHLLVLYPVLRLLDERELGELQQQMIRYRTSLASWQ |
| | | GESNFSEEIRIAGQIEELTELVKLTEPEPQFAEEVWGKRA |
| | | KEAFEDFIEGNMKNYEAFYLQSDNNTPVYRRNMSRLLR |
| | | SGLMGVYQKVLASHKQALKRDYLLWSEKHWNVKDEN |
| | | GADISSAEQAQCLLQRLHRKYAESPSRFTEEDCKLYEKV |
| | | LRRLEDYNQAVKNLSFSSLYEICVLNLEILSRWVGFVQD |
| | | WERDMYFLLLAWVRQGKLDGIKEEDVRDIFSEGNIIRNL |
| | | VDTLKGENMNAFESVYFPENKGSKYLGVRNDVAHLDL |
| | | MRKNGWRLEAGKTCSVMEDYINRLRFLLSYDQKRMNA |
| | | VTKTLQQIFDRHKVKIRFTVEKGGMLKIEDVTADKIVHL |
| | | KGSRLSGIEIPSHGERFIDTLKALMVYPRG* |
| 2 | ThpCas13a | MRIIKPYGRSHVEGVATEQPRRKLRLNTRPDISRDIPGFA |
| | (Thalassospira | QSHDALIIAQWISAIDKIATKPKPDQKPTQRQMNLRTTLG |
| | profundimaris) | DAAWQHLMAKNLLPAAKDPAIREKLHLIWQSKIAPWGA |
| | | SRPQEEKRGKPTPKGGWYERFCGALSPEAITQNVARQIA |
| | | KDIYDHLYVAAKRKGREPVKQGESSNKPGKFKPDRKLS |
| | | LIEERAESIAKNALRPGTHAPCPWGQDDQAIYEQAGDVA |
| | | TKIYDDARDYLEDKKRRSGNRNTSSVQYLPRDLAVKILY |
| | | AQYGRVFGPDTTIKAALDEQQSLFALHTAIKDCYHRLVN |
| | | DARKRHILRILPRNMAALFRLVRAQYDNRDINALIRLGK |
| | | VIHYHAGEQGKDEHHGIRDYWPSQQDIQNSRFWGSDGQ |
| | | ADIKRHEAFSRIWRHIIALASRTLHDWADPDSQKFTGDD |
| | | DDILMRAGAIESNVWDAGRYERKCDVLFGAQASLFCGA |
| | | EDFEKATLKQAITGTGNLRNATFHFKGKARFENELQRLA |
| | | DDVPVDVQSAIAALWQKDAEGRTRQIAETLQAVLAGHF |
| | | LSERQNRHILATLMAAMAQPGDVPLPRLRRVLARHDSIC |
| | | QRGRILPLPPCPDRAKLEESPALTCQYTVLKMLYDGPFR |
| | | AWLAQQNSTILNHYIDSTIARTNKAAQDMNGRKLAPAE |
| | | KDLITARAADIPRLSVDEKMVDFLGRLTAATATEMRVQ |
| | | RGYQSDGEKAQKQAGYIGEFECDVIARAFSDFLGQSGFD |
| | | FVLKLKADTPKPDAAQCDVAALIAPGDVPALTPQAWQQ |
| | | VLYFILHLVPVDDASRLLHQTRKWQALEKKGKDKEVKK |
| | | EKDKEVKKEDEKPDIADLQSVLMLYLDMHDAKFTGGA |
| | | ALHGIEKFAEFFVEKADFRAVFPPQSLQDQDRSIPRRGLR |
| | | EIVRFGHLPLLQHMSGTVKITHDNVVAWQTARTPDATG |
| | | TSPIARRQKQREELHALAVERPARFRNADLHNYMHALV |
| | | DVIKHRQLSAQVTLSDQVRLHRLMMGVLGRLVDYAGL |
| | | WERDLYFVLLALLYHHGVTPDDVLKGQGKRKLADGQV |
| | | VEALKPKNRKAAAPVGVFDDLDHYGIYQDDRQSIRNGL |
| | | SHFNMLRGGTAPDLSHWVNQTRRLVAHDRKLKNAVAK |
| | | SVIEMLAREGFDLDWTIEPDSGKHILRHGKIRTRQAQHFQ |
| | | KSRIRIEKKSAKPDKNDTVKIRENLHGDAMVERVARLFA |
| | | ARAQKYRDITTEKRLDHLFLKPKG* |
| 3 | AacCas12b | MAVKSIKVKLRLDDMPEIRAGLWKLHKEVNAGVRYYT |
| | (Alicyclobacillus | EWLSLLRQENLYRRSPNGDGEQECDKTAEECKAELLERL |
| | acidoterrestris) | RARQVENGHRGPAGSDDELLQLARQLYELLVPQAIGAK |
| | | GDAQQIARKFLSPLADKDAVGGLGIAKAGNKPRWVRM |
| | | REAGEPGWEEEKEKAETRKSADRTADVLRALADFGLKP |
| | | LMRVYTDSEMSSVEWKPLRKGQAVRTWDRDMFQQAIE |
| | | RMMSWESWNQRVGQEYAKLVEQKNRFEQKNFVGQEH |
| | | LVHLVNQLQQDMKEASPGLESKEQTAHYVTGRALRGSD |
| | | KVFEKWGKLAPDAPFDLYDAEIKNVQRRNTRRFGSHDL |
| | | FAKLAEPEYQALWREDASFLTRYAVYNSILRKLNHAKM |
| | | FATFTLPDATAHPIWTRFDKLGGNLHQYTFLFNEFGERR |
| | | HAIRFHKLLKVENGVAREVDDVTVPISMSEQLDNLLPRD |
| | | PNEPIALYFRDYGAEQHFTGEFGGAKIQCRRDQLAHMHR |
| | | RRGARDVYLNVSVRVQSQSEARGERRPPYAAVFRLVGD |
| | | NHRAFVHFDKLSDYLAEHPDDGKLGSEGLLSGLRVMSV |
| | | DLGLRTSASISVFRVARKDELKPNSKGRVPFFFPIKGNDN |
| | | LVAVHERSQLLKLPGETESKDLRAIREERQRTLRQLRTQ |
| | | LAYLRLLVRCGSEDVGRRERSWAKLIEQPVDAANHMTP |
| | | DWREAFENELQKLKSLHGICSDKEWMDAVYESVRRVW |
| | | RHMGKQVRDWRKDVRSGERPKIRGYAKDVVGGNSIEQI |
| | | EYLERQYKFLKSWSFFGKVSGQVLRAEKGSRFAITLREHI |
| | | DHAKEDRLKKLADRIIMEALGYVYALDERGKGKWVAK |
| | | YPPCQLILLEELSEYQFNNDRPPSENNQLMQWSHRGVFQ |
| | | ELINQAQVHDLLVGTMYAAFSSRFDARTGAPGIRCRRVP |
| | | ARCTQEHNPEPFPWWLNKFVVEHTLDACPLRADDLIPTG |
| | | EGEIFVSPFSAEEGDFHQIHADLNAAQNLQQRLWSDFDIS |
| | | QIRLRCDWGEVDGELVLIPRLTGKRTADSYSNKVFYTNT |
| | | GVTYYERERGKKRRKVFAQEKLSEEEAELLVEADEARE |
| | | KSVVLMRDPSGIINRGNWTRQKEFWSMVNQRIEGYLVK |
| | | QIRSRVPLQDSACENTGDI |
| 4 | AkCas12b | MAVKSIKVKLRLSECPDILAGMWQLHRATNAGVRYYTE |
| | (Alicyclobacillus | WVSLMRQEILYSRGPDGGQQCYMTAEDCQRELLRRLRN |
| | kakegawensis) | RQLHNGRQDQPGTDADLLAISRRLYELLVLQSIGKRGDA |
| | | QQIASSFLSPLVDPNSKGGRGEAKSGRKPAWQKMRDQG |
| | | DPRWVAAREKYEQRKAVDPSKEILNSLDALGLRPLFAVF |
| | | TETYRSGVDWKPLGKSQGVRTWDRDMFQQALERLMSW |
| | | ESWNRRVGEEYARLFQQKMKFEQEHFAEQSHLVKLARA |
| | | LEADMRAASQGFEAKRGTAHQITRRALRGADRVFEIWK |
| | | SIPEEALFSQYDEVIRQVQAEKRRDFGSHDLFAKLAEPKY |
| | | QPLWRADETFLTRYALYNGVLRDLEKARQFATFTLPDA |
| | | CVNPIWTRFESSQGSNLHKYEFLFDHLGPGRHAVRFQRL |
| | | LVVESEGAKERDSVVVPVAPSGQLDKLVLREEEKSSVAL |
| | | HLHDTARPDGFMAEWAGAKLQYERSTLARKARRDKQG |
| | | MRSWRRQPSMLMSAAQMLEDAKQAGDVYLNISVRVKS |
| | | PSEVRGQRRPPYAALFRIDDKQRRVTVNYNKLSAYLEEH |
| | | PDKQIPGAPGLLSGLRVMSVDLGLRTSASISVFRVAKKEE |
| | | VEALGDGRPPHYYPIHGTDDLVAVHERSHLIQMPGETET |
| | | KQLRKLREERQAVLRPLFAQLALLRLLVRCGAADERIRT |
| | | RSWQRLTKQGREFTKRLTPSWREALELELTRLEAYCGR |
| | | VPDDEWSRIVDRTVIALWRRMGKQVRDWRKQVKSGAK |
| | | VKVKGYQLDVVGGNSLAQIDYLEQQYKFLRRWSFFARA |
| | | SGLVVRADRESHFAVALRQHIENAKRDRLKKLADRILM |
| | | EALGYVYEASGPREGQWTAQHPPCQLIILEELSAYRFSD |
| | | DRPPSENSKLMAWGHRGILEELVNQAQVHDVLVGTVYA |
| | | AFSSRFDARTGAPGVRCRRVPARFVGATVDDSLPLWLTE |
| | | FLDKHRLDKNLLRPDDVIPTGEGEFLVSPCGEEAARVRQ |
| | | VHADINAAQNLQRRLWQNFDITELRLRCDVKMGGEGTV |
| | | LVPRVNNARAKQLFGKKVLVSQDGVTFFERSQTGGKPH |
| | | SEKQTDLTDKELELIAEADEARAKSVVLFRDPSGHIGKG |
| | | HWIRQREFWSLVKQRIESHTAERIRVRGVGSSLD |
| 5 | BhCas12b | MATRSFILKIEPNEEVKKGLWKTHEVLNHGIAYYMNILK |
| | (Bacillus | LIRQEAIYEHHEQDPKNPKKVSKAEIQAELWDFVLKMQK |
| | hisashii) | CNSFTHEVDKDEVFNILRELYEELVPSSVEKKGEANQLS |
| | | NKFLYPLVDPNSQSGKGTASSGRKPRWYNLKIAGDPSW |
| | | EEEKKKWEEDKKKDPLAKILGKLAEYGLIPLFIPYTDSNE |
| | | PIVKEIKWMEKSRNQSVRRLDKDMFIQALERFLSWESW |
| | | NLKVKEEYEKVEKEYKTLEERIKEDIQALKALEQYEKER |
| | | QEQLLRDTLNTNEYRLSKRGLRGWREIIQKWLKMDENE |
| | | PSEKYLEVFKDYQRKHPREAGDYSVYEFLSKKENHFIWR |
| | | NHPEYPYLYATFCEIDKKKKDAKQQATFTLADPINHPLW |
| | | VRFEERSGSNLNKYRILTEQLHTEKLKKKLTVQLDRLIYP |
| | | TESGGWEEKGKVDIVLLPSRQFYNQLFLDIEEKGKHAFTY |
| | | KDESnCFPLKGTLGGARVQFDRDHLRRYPHKVESGNVG |
| | | RIYFNMTVNIEPTESPVSKSLKIHRDDFPKVVNFKPKELT |
| | | EWIKDSKGKKLKSGIESLEIGLRVMSIDLGQRQAAAASIF |
| | | EVVDQKPDIEGKLFFPIKGTELYAVHRASFNIKLPGETLV |
| | | KSREVLRKAREDNLKLMNQKLNFLRNVLHFQQFEDITER |
| | | EKRVTKWISRQENSDVPLVYQDELIQIRELMYKPYKDW |
| | | VAFLKQLHKRLEVEIGKEVKHWRKSLSDGRKGLYGISLK |
| | | NIDEIDRTRKFLLRWSLRPTEPGEVRRLEPGQRFAIDQLN |
| | | HLNALKEDRLKKMANTIIMHALGYCYDVRKKKWQAKN |
| | | PACQIILFEDLSNYNPYEERSRFENSKLMKWSRREIPRQV |
| | | ALQGEIYGLQVGEVGAQFSSRFHAKTGSPGIRCSWTKE |
| | | KLQDNRFFKNLQREGRLTLDKIAVLKEGDLYPDKGGEK |
| | | FISLSKDRKCVTTHADINAAQNLQKRFWTRTHGFYKVY |
| | | CKAYQVDGQTVYIPESKDQKQKIIEEFGEGYFILKDGVY |
| | | EWVNAGKLKIKKGSSKQSSSELVDSDILKDSFDLASELK |
| | | GEKLMLYRDPSGNVFPSDKWMAAGVFFGKLERILISKLT |
| | | NQYSISTIEDDSSKQSM |
| 6 | LsCas12b | MSIRSFKLKIKTKSGVNAEELRRGLWRTHQLINDGIAYY |
| | (Laceyella | MNWLVLLRQEDLFIRNEETNEIEKRSKEEIQGELLERVHK |
| | sediminis) | QQQRNQWSGEVDDQTLLQTLRHLYEEIVPSVIGKSGNAS |
| | | LKARFFLGPLVDPNNKTTKDVSKSGPTPKWKKMKDAGD |
| | | PNWVQEYEKYMAERQTLVRLEEMGLIPLFPMYTDEVGD |
| | | IHWLPQASGYTRTWDRDMFQQAIERLLSWESWNRRVRE |
| | | RRAQFEKKTHDFASRFSESDVQWMNKLREYEAQQEKSL |
| | | EENAFAPNEPYALTKKALRGWERVYHSWMRLDSAASEE |
| | | AYWQEVATCQTAMRGEFGDPAIYQFLAQKENHDIWRG |
| | | YPERVIDFAELNHLQRELRRAKEDATFTLPDSVDHPLWV |
| | | RYEAPGGTNIHGYDLVQDTKRNLTLILDKFILPDENGSW |
| | | HEVKKVPFSLAKSKQFHRQVWLQEEQKQKKREVVFYD |
| | | YSTNLPHLGTLAGAKLQWDRNFLNKRTQQQIEETGEIGK |
| | | VFFNISVDVRPAVEVKNGRLQNGLGKALTVLTHPDGTKI |
| | | VTGWKAEQLEKWVGESGRVSSLGLDSLSEGLRVMSIDL |
| | | GQRTSATVSVFEITKEAPDNPYKFFYQLEGTELFAVHQRS |
| | | FLLALPGENPPQKIKQMREIRWKERNRIKQQVDQLSAILR |
| | | LHKKVNEDERIQAIDKLLQKVASWQLNEEIATAWNQAL |
| | | SQLYSKAKENDLQWNQAIKNAHHQLEPVVGKQISLWRK |
| | | DLSTGRQGIAGLSLWSIEELEATKKLLTRWSKRSREPGV |
| | | VKRIERFETFAKQIQHHINQVKENRLKQLANLIVMTALG |
| | | YKYDQEQKKWIEVYPACQVVLFENLRSYRFSYERSRRE |
| | | NKKLMEWSHRSIPKLVQMQGELFGLQVADVYAAYSSR |
| | | YHGRTGAPGIRCHALTEADLRNETNIIHELIEAGFIKEEHR |
| | | PYLQQGDLVPWSGGELFATLQKPYDNPRILTLHADINAA |
| | | QNIQKRFWHPSMWFRVNCESVMEGEIVTYVPKNKTVHK |
| | | KQGKTFRFVKVEGSDVYEWAKWSKNRNKNTFSSITERK |
| | | PPSSMILFRDPSGTFFKEQEWVEQKTFWGKVQSMIQAYM |
| | | KKTIVQRMEE |
| 7 | Cas12 | MFKKKLFDDEEFISLAQNQEESNALNAFKGFTTHFKDFQENRKNMYS |
| | | EDKESTAIAYRIIHENLPVFITNNIRFEKIINELDRSNIHSIEKELKEELANN |
| | | KLKDIFNIEYFQNTLTQNDITRYNTIIGGKVKADGKKVQGLNEYINLFN |
| | | QHNKDKKLPLLKPLYKQILSEENSASFIVPAFEKDNEVLQSIFDFWNKCI |
| | | IDAKGPISGKKYNLLSKIQSLLQNLDKLKNNQLEEMYFENENLSTISNDV |
| | | YGQWNLIRDALGNFYNSIDAKKNKKDYYSWKEIQDALVYYKQTNDEY |
| | | KDIDQKAFLIYFKEMKVNDGEENTNNNIINLINERYKRIEPLLKEDRDN |
| | | RKDLHQDKGKVAIIKEFLDSLKLLQNTIKLLYVDDSLDNMNYDFYNQLT |
| | | DYYETLRPLNTLYNRVRNYMTRKPFSEEKFVLTFNSPTLLDGWDLNKE |
| | | EANLGVILRKDNKYYLGIMNKGDNKIFKKYDEEPGDDYYEKMVYKLLP |
| | | GPNRMLRKVFFSNKNIEYYKPNQDIQNLYNKGEFKKGESLNKESLHKLI |
| | | DFYKNSISKNGDWSVFNFKFKKTTAYDDISQFYKDVENQGYKLFFKTIK |
| | | TSYIDQLVNEGKLYLFQIYNKDFSENKKRKDESNPNLHTIYFKNLFSEDN |
| | | LKNVVYKLNGKAEVFYRKKSIEYPEEIRRKGHHYNELKDKFDYPIIKDKR |
| | | YSEDKFLFHVPITLNFLAKSDEKVNEMVKNYIAATNEKIHIIGIDRGERN |
| | | LLYLSLIDSNGNIVKQQSLNIIELPKYQKQIDYHAKLNEKEKQRLAARQN |
| | | WDVIENIKELKEGYLSQVIHQIARLMVDYKAILVMEDLNFGFKRGRFK |
| | | VEKQVYQKFEKMLIDKLSYLVFKEKNLCEPGGSLRAYQLSAPFKSFKAL |
| | | GKQSGMIFYVPAQYTSKIDPTTGFYNFLNIDVSNLARSKETFSKFDKIVY |
| | | NKKEDYFEFYCKMINFESANQLTKKSQNKANAELKEFQWILCSTHHDR |
| | | FKVERKNNQINYCKINVNEELKKLLNSKGINYEKSNDLKSEILNIDESKFF |
| | | KELGYLLKILVSLRYNNGKKGSEEQDFILSPVKNASGKFFCTLDNNNTLP |
| | | LDADANGAYNIALKGLMIVQRVKAGGKLDLSISKDDWINFLIMNKKLP |
| | | K |
| 8 | Cas12 | MSNQSVFKDFTNLYELSKTLRFELKPVGKTLRMLEDAKVFKTDELIQKK |
| | | YEQTKPFINKLHQEFVKESLEGRSLEGLESYQDILKEWQKDKKDKIAQK |
| | | NLGIKEKELYKQVTQLFNAKAKEWSEPYAHLGLKKKDIGILFEEGVFKIL |
| | | KEKYNNDKDAKITNKVTGEIFFEDFWKGFVGYFQKFFETRKNFYKDDG |
| | | TSTAIATRIVAQNLKRFCDNIGLFEKIKDQIDSSEVEQSFGISMEKVFSLD |
| | | FYNQCLLQGGIDKYNEILGGKTLENGEKFKGINELINKYRQDNKGDKSS |
| | | FLKILDKQILSEKESFIDEIKNDKELEETLKNLHETAKVKTKIFGTLFEDFIG |
| | | NNTKYDLAKIYISKEAFNTISHKWTGGTDLFAENLFNALKDEQILKSSAK |
| | | KKDGSYVFPDFIEFLHIKTALENVPKDINFWKERYYVNKEGENKEFFLG |
| | | NGEIWQQFLQIFNFEFNELFQKEIIDNQTGKKMHIGYKVYKEEISKLLE |
| | | DFKVDKDSTVIIKHFADSVLWIYQMAKYFALEKKRTWRDEYDLDTFYT |
| | | DPKNGYLAFYENAYEEIVQIYNKLRNYLTKKPYSTEKWKLNFQNSTLAS |
| | | GWDKNKEADNFTVILRKDGKYFLGLMRKGANKLFDKRYGSEFSQGLE |
| | | KGKYEKMNYKYFPSPSKMIPKTSTQVHEVKKHFKNSSEPFFLEESSSLG |
| | | KFIKQLKITKEVFDLNNFEYKKSYLSTLNGESPDESQRVKADSKKTGQV |
| | | KLFQKEFLNLSQNELLYKKSLFAWVDFCKEYLDCFPSTGDGFLQFKKYI |
| | | QDTEKYESIDQFYKDIERGGYKISFQNISEEYISCKNQNSELYLFKIHNKD |
| | | WNLKDGKPKTGMKNLHTMYFESLFSSENIAQNFPMKLNGQAEIFYRP |
| | | KTDINKLEMKKDSKGKNVVDHKRYEEDKIFFHLPMTLNRGKSLFNFNV |
| | | QLNNFLADNPEINIIGVDRGEKHLAYYSVINQNQEILDGGTLNVVKGG |
| | | NGKDIDYHKKLEDKAEKREQARKDWQDVEGIKDLKKGYISQVVRKLA |
| | | DLAIEHNAIIVFEDLNMRFKQIRGGIEKSVYQQLEKALIEKLSFLVRKNE |
| | | KNPEEAGYLLKAYQLSAPFETFQRIGKQTGIIFYTQASYTSKIDPLTGWR |
| | | PNLYLKYSNAKKAKADISKFSEIEFINNRFEFTYDLQEFRSQKDKKKEYP |
| | | KKTLWTLCSSVERYRWNRKLNDNKGGYEHYSDLTSDFKKLFKKYNINI |
| | | NEDILGQIENMDTDDRKNNARFFSGFMFFWNLICQIRNTNSDVISGE |
| | | SDNDFILSPVEPFFDSRKASQFGSDLPENGDDNGAFNIARKGIMILKKI |
| | | SQYVEENENCDKLKWGDLYISHTDWDNFI |
| 9 | Cas12 | MTNYTDFIGLYPVQKTLRFELRPQGKTAEKMRESGLLEQDREKAKNYI |
| | | VMKALIDDYHRRFINELLEKASFDWQPLFEALNNVKVNKDDKSKKELE |
| | | KEQLHMRKELIGLFEKDERFKYLFSEKLFSELLNKEISERNDPDEMEAM |
| | | RSFDRFSGYFIGFHENRRNIYSNEDKHNSLAYRVVAENFPKFADNCRK |
| | | YSLIKENMQEAVVEFKKEIASVVDIDVDQMFDISYFNKVLTQKGIDDY |
| | | NTMLGGVSEEGSVKIRGLNEFLNLYYQKVTDNKRIKMAPLYKQILCESK |
| | | TKSFIPYMFENDEEVISSINQYYDSVKYDILQRSVYLLSNYKEYDASKIFI |
| | | DQKSISSISIVLFGSWETLGGLMQIYKADQIGDPGLEKTRKKVDKWLSS |
| | | SYFTLKEVFEAIGEQDPFRVYVEKLSLVLKNIEEFDKSCLLEGTHFSGDEL |
| | | LTQDIKGFLDLLMEVQHLMKPFNAKEDLDKDAAFYSEYNEIYEALSEIIP |
| | | LYNKVRNYATKKKYSTYKIKMNFGNPTLAAGWDLNKERDNTAVILLR |
| | | GNNYYLGIMNPKKKTKFEELPSGEDNDCYRKMVYKLLPGPNKMLPKV |
| | | FFSKKGIGTFNPSKEILEGYETGKHKLGDSFDIDYCHSLIDFFKENIPKYG |
| | | DWGTYEFKFSPTEEYSDISQFYKEVSEQGYKITFQNISRKAIDDLVNNG |
| | | ALFLYQIYNKDFSEHSKGKNNLHTMYWKAAFSEENLRNVVIKINGEAE |
| | | LFYRDKSDISKTEHSAGTILVNRTDRKDNPIPNSIYYELFKYKTGQIKSVS |
| | | DEAKQYLDDLVTHEAKYPITKDRRYTEDRMFFHIPITLNFGSSGNTNIN |
| | | KAVIDHVLNSKDVHIIGIDRGERNLLYVSVIDRKGNIIKQRSLNVIDGIDY |
| | | HEKLDQREKENISARKSWSNVEKIKDLKEGYLSYVIH |
| 10 | Cas12 | MKDFYQFTNLYALSKTLRFSLIPTPATKQMLEDAKVFEKDETIQKKYEA |
| | | TKPYFDRLHREFALEALQDQKLDFKNYLELYRKYKADKKASGKLLINIEK |
| | | DLRKEVVKLFDKQGEKWAKQYPGLKNKNIGVLFKEAVFTVILKERYGN |
| | | EKETQILDESSGQLVSIFDSWKGFIGYFKKFHETRKNFYKDDGTSTALA |
| | | TRIIDQNLKRFCDNILIFESTKEKVDFSEVEISFGKPLSEVFTLEFYNTCFL |
| | | QNGIDFYTKILGGETLQNGEKVKGLNECINLHKQKTGEKLPFFKSLDKQ |
| | | ILSEKDKFFIDEISNETQLLEVLKSFVASAESKTDTIKTLVDDFVKDQDKY |
| | | DLNYIYFSNDGLNTITRKWTTETQVFEEALYTALKAAKVVSSSAKKNEG |
| | | GYSFPDFIPFAHLKTALESIKIDGTIWRDNFNAIENFEEKSIWAQFLAIY |
| | | NFELSNLFETEIKNPEIGNCPTIGYNVYKQDFEELLKSFVYDPNAKVTIK |
| | | NFADNVLSIYQMAKYFAVEKKRGWNTDYELDVFYTDPQNGYLQYYE |
| | | NAYEEIVQVYNKLRNYLTKKPYSEEKWKLNFDSGTPIKYTTRAIIFNNTT |
| | | NERYYLGLLKKGVAKPREFEPINNNIISSGEFRRMIIQQLKFQTLAGKGY |
| | | VRDFGVKYSEDKDGVKHLQQLIKKQYLSKYPCLKKIADGVYNDKKAFD |
| | | ADIKDVLLETYNLDFQPISEEFILNKNRLGEIYLFEIHNKDWNLKDGKNK |
| | | SGSKNLHTMYFESLFVDKTTFKLNNEGAEVFYRPATNEGKLGTKKDRN |
| | | GKIIINHKRYATDKILFHCPIGLNKDAGKSYTFNAKINNMLANNPDINII |
| | | GVDRGEKHLAYYSVITQKGKILDRGSLNKVEGGDKQEIDYAKKLEETAK |
| | | NREQARKDWQAVEGIKDLKRGYISQVVRKLADLAIEHNAIIVFEDLNM |
| | | RFKQIRGGIEKSVYQQLEKALIDKLSFLVMKGEADPEKAGHLLKAYQLV |
| | | APFESFQSMGKQTGIIFYTQANYTSKIDPITGWRPNLYLKYTSAEKAKA |
| | | DILKFSKIEFVNNRFELTYDIKNFVLDKKVVLSNKTKWTVCSSVERFRW |
| | | NRRLESNQGNYEHYENLTENLSSLFKDFGFEIEQNIIRQVEQLATKGNE |
| | | QFFRSFIFYVNLIFQIRNTDAKAKDQNKEDFILSPVEPFFDSRTPEKFGE |
| | | NLPENGDDNGAFNIARKGIIMLNKISAYKQEVGNVDKIIWKDLFISAAE |
| | | WDNFTQE |
| 11 | Cas12 | MDSYEQFTKLYPIQKTIRFELKPQGRTKEHFDNSNFLEKDRERDDNYKI |
| | | LKEVIDDYHREFIDECLSNIQLNWDDLKKFSEEYRRSKEKKNNRDSESE |
| | | QKRMSTTSETRAINKKNLEAEQKRMRGEIVSAFKKDDRFKHLFSEKLFS |
| | | ILLKNQIYEKGTLEEIEAFDCFNKFSGYFKSFHENRKNMYSDEDKETAIS |
| | | YRIINENFPKLLDNFEKYQYVCREYPEQIREAESTLAEAGCYIKMDEIFSI |
| | | DNFNNVMMQGGKESGISRYNLAIGGIVQGTGEKPKGLNEFLNLAYQ |
| | | NEPNGRKKIRMEPLYKQILSKEESFSYRLEAFTDDSQLLSAIRSFFDIVEK |
| | | DKNGNIFDRAVNLMSSFSNYDTSKIYIRKAYLNQVSKEIFGYRGKSDSK |
| | | PAKTADESLNKSGGWEKLGQMLRDYKADSIGDRNLEKTCKKVDKWL |
| | | DSDEFTLSDILGAISLAGSNETFEAYVSEICVARRNIDKEKEKEKNINVEK |
| | | ISGDTESIQIIKALLDSVQEFFHLLSPFQLHPNTPHDWTFYAEFNDIYDK |
| | | LSAITPLYNQARNHLTKKNLDTSKIKLNFNNPTLANGWDVNKEYENTA |
| | | VILIRDGKYYLGIMNPKNKRKIKFDEGSGAGPFYQKMVYKLLPGPYRM |
| | | LPKVFFAKKNIDYYNPSQEIREGYKAGKHKKGKEFDKGFCHKLIDFFKES |
| | | IQKNENWKVFDFKFSPTESYDDISEFYQEVEKQGYRMYFVNIPSDTIDR |
| | | YVEGGDMFLFQIYNKDFAKGAKGNKDMHTLYWNAVFSEENLQKGV |
| | | MKLSGEAELFYRKKSDIKDPPHREGEILVNRTYIDRTHVSGVMGEQNT |
| | | VKESRIPVPDEIHKNLFDYYNHGRELTKEEKEYCDKVGSFKAYYGIVKD |
| | | RRYLENKMYFHVPLTLNFKAIGEKRINKMAIEKFLTDENACIIGIDRGER |
| | | NLLYYSIIDRNGKIIDQKSLNVIDGFDYHEKLSQRQTEREVARQSWNSI |
| | | GKIKDLKEGYLAKAVHEISKMAIKYNAIVVLEDLHFGFKKGRLKVEKQIY |
| | | QKFEEMLINKLNYLVFKDVSDSSDAGGVLNAYQLTAPLESFSKLGKQS |
| | | GILFYVPAAFTSVIDPTTGFVDLFNSSSITSTQKKKEFLQRFESIVYSARD |
| | | GGIFAFTFDYRNFSKIATDHRNMWTVYTHGERIRYVRDEKCYKTTDPT |
| | | KRIKEALSGIEYDDGSDIRDKITQSGDNNLINTVYHSFMDTIKMRNKD |
| | | GRIDYIISPVKNRNGEFFRSDYKHRDFPVDADANGAYHIALKGELLMR |
| | | MIGKTYDSNSDKMPKLEHKDWFEFMQTRGDQ |
| 12 | Cas12 | MKKEKEFKSFGDFTNLYEISKTLRFELKPVENTQTMLDEADVFGKDKVI |
| | | KDKYTKTKPFIDKLHREFVDESLKDVSLSGLKKYSEVLENWKKNKKDKD |
| | | IVKELKKEEERLRKEVVEFFDNTAKKWANEKYKELGLKKKDIGILFEESV |
| | | FDLLKEKYGEEQDSFLKEEKGDFLKNEKGEKVSIFDEWKGFVGYFTKFQ |
| | | ETRKNFYKNDGTETALATRIIDQNLKRFCDNIDDFKKIKNKIDFSEVEKN |
| | | FNKTADVFSLDFYNQCLLQKGIDSYNEFIGGKTLENGKKLKGVNELVN |
| | | EYRQKNKNEKVSFLKLLDKQILSEKEKLSFGIENDEQLLVVLNSFYETAE |
| | | EKTKILRTLFGDFVEHNENYDLDKTYISKVAFNTISHKWTNETHKFEELL |
| | | YGAMKEDKPIGLNYDKKEDSYKFPDFIALGYLKKCLNNLDCDTKFWKE |
| | | KYYENNADKKDKDKGFLTGGQNAWDQFLQIFIFEFNQLFNSEAFDNK |
| | | GKEIKIGYDNFRKDFEEIINQKDFKNDENLKIAIKNFADSVLWIYQMAK |
| | | YFAIEKKRGWDDDFELSEFYTNPSNGYSLFYDRAYEEIVQKYNDLRNYL |
| | | TKKPYKEDKWKLNFENPTLANGFDKNKESDNSTVILRKKRKYYLGLMK |
| | | KGNNKIFEDRNKAEFIRNIESGAYEKMAYKYLPDVAKMIPKCSTQLNE |
| | | AKNHFRNSADDLEIKKSFSNPLKITKRIFDLNNIQYDKTNVSKKISGDNK |
| | | GIKIFQKEYYKISGDFDVYKSALNDWIDFCKDFLSKYDSTKDFDFSILRKT |
| | | KDYKSLDEFYVDVAKITYKISFTPVSESYIDQKNKNGELYLFEIYNQDFAK |
| | | GKMGAKNLHTLYFENVFSPENISKNFPIKLNGNAELFFRPKSIESKKEKR |
| | | NFVREIVNKKRYSEDKIFFHCPITLNRETGSIYRFNNYVNNFLSENNINII |
| | | GVDRGEKHLAYYSVIDKNGVKIGGGSFNEINKVDYAKKLEERAGEREQ |
| | | SRKDWQVVEGIKDLKKGYISQVVRELADLAIKHNAIIVLEDLNMRFKQI |
| | | RGGIEKSIYQQLEKALIDKLSFLVEKGEKDPNQAGHILKAYQLAAPFTSF |
| | | KDMGKQTGIVFYTQASYTSKTCPNCGFRKNNNKFYFENNIGKAQDAL |
| | | KKLKTFEYDSENKCFGLSYCLSDFANKEEVEKNKNKKRNNAPYSDIEKK |
| | | DCFELSTKDAVRYRWHDKNTERGKTFFEGESVYEEKEEKEIGQ.TKRGL |
| | | VKEYDISKCLIGLFEKTGLDYKQNLLDKINSGKFDGTFYKNLFNYLNLLFE |
| | | IRNSISGTEIDYISCPECQFHTDKSKTIKNGDDNGSYNIARKGMIILDKIK |
| | | QFKKENGSLDKMGWGELFIDLEEWDKFAQKKNNNIIDK |
| 13 | Cas12 | MKSFDSFTNLYSLSKTLKFEMRPVGNTQKMLDNAGVFEKDKLIQKKY |
| | | GKTKPYFDRLHREFIEEALTGVELIGLDENFRTLVDWQKDKKNNVAM |
| | | KAYENSLQRLRTEIGKIFNLKAEDWVKNKYPILGLKNKNTDILFEEAVFG |
| | | ILKARYGEEKDTFIEVEEIDKTGKSKINQISIFDSWKGFTGYFKKFFETRK |
| | | NFYKNDGTSTAIATRIIDQNLKRFIDNLSIVESVRQKVDLAETEKSFSISL |
| | | SQFFSIDFYNKCLLQDGIDYYNKIIGGETLKNGEKLIGLNELINQYRQNN |
| | | KDQKIPFFKLLDKQILSEKILFLDEIKNDTELIEALSQFAKTAEEKTKIVKKL |
| | | FADFVENNSKYDLAQIYISQEAFNTISNKWTSETETFAKYLFEAMKSGK |
| | | LAKYEKKDNSYKFPDFIALSQMKSALLSISLEGHFWKEKYYKISKFQEKT |
| | | NWEQFLAIFLYEFNSLFSDKINTKDGETKQVGYYLFAKDLHNLILSEQID |
| | | IPKDSKVTIKDFADSVLTIYQMAKYFAVEKKRAWLAEYELDSFYTQPDT |
| | | GYLQFYDNAYEDIVQVYNKLRNYLTKKPYSEEKWKLNFENSTLANGW |
| | | DKNKESDNSAVILQKGGKYYLGLITKGHNKIFDDRFQEKFIVGIEGGKY |
| | | EKIVYKFFPDQAKMFPKVCFSAKGLEFFRPSEEILRIYNNAEFKKGETYSI |
| | | DSMQKLIDFYKDCLTKYEGWACYTFRHLKPTEEYQNNIGEFFRDVAED |
| | | GYRIDFQGISDQYIHEKNEKGELHLFEIHNKDWNLDKARDGKSKTTQK |
| | | NLHTLYFESLFSNDNVVQNFPIKLNGQAEIFYRPKTEKDKLESKKDKKG |
| | | NKVIDHKRYSENKIFFHVPLTLNRTKNDSYRFNAQINNFLANNKDINII |
| | | GVDRGEKHLVYYSVITQASDILESGSLNELNGVNYAEKLGKKAENREQ |
| | | ARRDWQDVQGIKDLKKGYISQVVRKLADLAIKHNAIIILEDLNMRFKQ |
| | | VRGGIEKSIYQQLEKALIDKLSFLVDKGEKNPEQAGHLLKAYQLSAPFET |
| | | FQKMGKQTGIIFYTQASYTSKSDPVTGWRPHLYLKYFSAKKAKDDIAK |
| | | FTKIEFVNDRFELTYDIKDFQQAKEYPNKTVWKVCSNVERFRWDKNL |
| | | NQNKGGYTHYTNITENIQELFTKYGIDITKDLLTOISTIDEKQNTSFFRD |
| | | FIFYFNLICQIRNTDDSEIAKKNGKDDFILSPVEPFFDSRKDNGNKLPEN |
| | | GDDNGAYNIARKGIVILNKISQYSEKNENCEKMKWGDLYVSNIDWDN |
| | | FVTOANARH |
| 14 | Cas12 | MNTQKKEFNPKSFKDFTNLYSLNKTLRFSLTPNKKTAEILEFNKQKEVK |
| | | CFSNDRKIAGAYQEIKKYLNKLHQEFIQEAMKFFAFSEEELKGFEKEYLN |
| | | LLNFTDKDNFKKKNKIRNEYEQERKILTIKIATYFSKFKSEKYQSFNLANI |
| | | TGKKVFSILEQKYKEDKKTLKIIHIFKYKPTKDEKKEGEAVNFSTYLTGFN |
| | | ENRKNFYKSEDKAGQFATRTIDNLAQFIKNKKLFEDKYQKNYSKIGILD |
| | | EQIKIFNLDYFNNLFLQEGLDEYNGILGNNKGEENKSNEGINQKINIFK |
| | | QKEKARLKKEKENFNKSDFPLFKELYKQIGSIRKENDVYVEIKTDKELVE |
| | | ELNNFPKNVENYLKDIQSFYKTFFEKLQNEEYELDKIYLPKSVGTYFSYIA |
| | | FSDWNKLAFIYNKRYKNEKIKIVEGGDVNVQYRSLEVLKNRIDELKDED |
| | | NLNFNKFFIDKLKFNEAKKENNWQNFWFCIEYYINSQFIGGEKNILNKE |
| | | KNEYEILPFGSLKELKEKYFEAVKKYKEKMVDTESGLTDDEEKEIKETLK |
| | | NYLDRIKEIERIAKYFDLKKSFEEIKQEDLDSNFYGEYQKVVDKTNELKIY |
| | | QYYSEFRNYLTQNNSVEEKIKLNFNSGLLLDGWDLNKEKVKFSIIFQEN |
| | | GKYYLGIINKEKDKTILDKDKHPEIFTKNSDFRKMEYKLFPSPSKMLPKIS |
| | | FSETAKKGDEDVGWSEEIQKIKDEFAEFQEYKKKSKDNWKDEFNRGK |
| | | LNKLIDYYKQVLEKHSEGYMNTYNFELKDSSKYKNLGEFNDDIARQNY |
| | | KVKFVGIDKNYIDEKVANGELFLFQIYNKDFSEDKKEGSTNNLETIYFKE |
| | | LFSKENLENPVFKLSGGAEMFFRNKIEKKKEKKKLDKDGKPMISKKGEK |
| | | VVDKRRFSENKILFHLPIEINYGKGKMPNFNKKINEYISKNPENIKIIGID |
| | | RGEKHLLYYSIIDQNGNNIESMSLNAVDEFGNFVNPEKLEEYEIDNNG |
| | | KKERRWKYIVNDKEIKVTNYQRKLDELEKERQKSRQSWQNINKIKNLK |
| | | KGYISFVVKKIVDLAIENNAIIILEDLNFGFKSFRQKIEKNVYQQFEKALID |
| | | KLGFVVDKQKQNQRFAPQLSAPFESFQKIGKQTGIVYYVLANNTSKVC |
| | | PSCQWIKNFYLKYEKKNTIFNLQKNQKLKVFFEQEKNRFRFEYQMSKE |
| | | YISVYSDVDRQRYDKTKNQNKGGYLEYKNSNQKEIIDKDGVIQKQSITL |
| | | QLKELFKENHIDLEKEILKQLDNKKEKNSGYTGVYNKFIYLFNLILQIRNA |
| | | ISFREKDYIQCPSCHFDTRKENYLKINDGDGNGAYNIALRGLYLLKGKN |
| | | GIINNLEKIKLIFSNNDYFQWAKKLKNKK |
| 15 | Cas12 | MEEKMLKSYDYFTKLYSLQKTLRFELKPIGKTLEHIKNSGIIESDETLEEQ |
| | | YAIVKNIIDKLHRKHIDEALSLVDFTKHLDTLKTFQELYLKRGKTDKEKEE |
| | | LEKLSADLRKLIVSYLKGNVKEKTQHNLNPIKERFEILFGKELFTNEEFFLL |
| | | AENEKEKKAIQAFKGFTTYFKGFQENRKNMYSEEGNSTSIAYRIINENL |
| | | PLFIENIARFQKVMSTIEKTTIKKLEQNLKTELKKHNLPGIFTIEYFNNVLT |
| | | QEGISRYNTIIGGKTTHEGVKIQGLNEIINLYNQQSKDVKLPILKPLHKQI |
| | | LSEEYSTSFKIKAFENDNEVLKAIDTFWNEHIEKSIHPVTGNKFNILSKIE |
| | | NLCDQLQKYKDKDLEKLFIERKNLSTVSHQVYGQWNIIRDALRMHLE |
| | | MNNKNIKEKDIDKYLDNDAFSWKEIKDSIKIYKEHVEDAKELNENGIIK |
| | | YFSAMSINEEDDEKEYSISLIKNINEKYNNVKSILQEDRTGKSDLHQDKE |
| | | KVGIIKEFLDSLKQLQWFLRLLYVTVPLDEKDYEFYNELEVYYEALLPLNS |
| | | LYNKVRNYMTRKPYSVEKFKLNFNSPTLLDGWDKNKETANLSIILRKN |
| | | GKYYLGIMNKENNTIFEYYPGTKSNDYYEKMIYKLLPGPNKMLPKVFFS |
| | | KKGLEYYNPPKEILNIYEKGEFKKDKSGNFKKESLHTLIDFYKEAIAKNED |
| | | WEVFNFKFKNTKEYEDISQFYRDVEEQGYLITFEKVDANYVDKLVKEG |
| | | KLYLFQIYNKDFSENKKSKGNPNLHTIYWKGLYDSENLKNVVYKLNGE |
| | | AEVFYRKKSIDYPEEIYNHGHHKEELLGKFNYPIIKDRRYTQDKFLFHVPI |
| | | TMNFISKEEKRVNQLACEYLSATKEDVHIIGIDRGERHLLYLSLIDKEGNI |
| | | KKQLSLNTIKNENYDKEIDYRVKLDEKEKKRDEARKNWDVIENIKELKE |
| | | GYMSQVIHIIAKMMVEEKAILIMEDLNIGFKRGRFKVEKQVYQKFEK |
| | | MLIDKLNYLVFKNKNPLEPGGSLNAYQLTSKFDSFKKLGKQSGFIFYVP |
| | | SAYTSKIDPTTGFYNFIQVDVPNLEKGKEFFSKFEKIIYNTKEDYFEFHCK |
| | | YGKFVSEPKNKDNDRKTKESLTYYNAIKDTVWVVCSTNHERYKIVRNK |
| | | AGYYESHPVDVTKNLKDIFSQANINYNEGKDIKPIIIESNNAKLLKSIAEQ |
| | | LKLILAMRYNNGKHGDDEKDYILSPVKNKQGKFFCTLDGNQTLPINAD |
| | | ANGAYNIALKGLLLIEKIKKQQGKIKDLYISNLEWFMFMMSR |
| 16 | Cas12 | MNNYDEFTKLYPIQKTIRFELKPQGRTMEHLETFNFFEEDRDRAEKYKI |
| | | LKEAIDEYHKKFIDEHLTNMSLDWNSLKQISEKYYKSREEKDKKVFLSE |
| | | QKRMRQEIVSEFKKDDRFKDLFSKKLFSELLKEEIYKKGNHQEIDALKSF |
| | | DKFSGYFIGLHENRKNMYSDGDEITAISNRIVNENFPKFLDNLQKYQE |
| | | ARKKYPEWIIKAESALVAHNIKMDEVFSLEYFNKVLNQEGIQRYNLALG |
| | | GYVTKSGEKMMGLNDALNLAHQSEKSSKGRIHMTPLFKQILSEKESFS |
| | | YIPDVFTEDSQLLPSIGGFFAQIENDKDGNIFDRALELISSYAEYDTERIYI |
| | | RQADINRVSNVIFGEWGTLGGLMREYKADSINDINLERTCKKVDKWL |
| | | DSKEFALSDVLEAIKRTGNNDAFNEYISKMRTAREKIDAARKEMKFISE |
| | | KISGDEESIHIIKTLLDSVQQFLHFFNLFKARQDIPLDGAFYAEFDEVHSK |
| | | LFAIVPLYNKVRNYLTKNNLNTKKIKLNFKNPTLANGWDQNKVYDYAS |
| | | LIFLRDGNYYLGIINPKRKKNIKFEQGSGNGPFYRKMVYKQIPGPNKNL |
| | | PRVFLTSTKGKKEYKPSKEIIEGYEADKHIRGDKFDLDFCHKLIDFFKESIE |
| | | KHKDWSKFNFYFSPTESYGDISEFYLDVEKQGYRMHFENISAETIDEYV |
| | | EKGDLFLFQIYNKDFVKAATGKKDMHTIYWNAAFSPENLQDVVVKLN |
| | | GEAELFYRDKSDIKEIVHREGEILVNRTYNGRTPVPDKIHKKLTDYHNG |
| | | RTKDLGEAKEYLDKVRYFKAHYDITKDRRYLNDKIYFHVPLTLNFKANG |
| | | KKNLNKMVIEKFLSDEKAHIIGIDRGERNLLYYSIIDRSGKIIDQQSLNVI |
| | | DGFDYREKLNQREIEMKDARQSWNAIGKIKDLKEGYLSKAVHEITKM |
| | | AIQYNAIVVMEELNYGFKRGRFKVEKQIYQKFENMLIDKMNYLVFKD |
| | | APDESPGGVLNAYQLTNPLESFAKLGKQTGILFYVPAAYTSKIDPTTGF |
| | | VNLFNTSSKTNAQERKEFLQKFESISYSAKDGGIFAFAFDYRKFGTSKTD |
| | | HKNVWTAYTNGERMRYIKEKKRNELFDPSKEIKEALTSSGIKYDGGQN |
| | | ILPDILRSNNNGLIYTMYSSFIAAIQMRVYDGKEDYIISPIKNSKGEFFRT |
| | | DPKRRELPIDADANGAYNIALRGELTMRAIAEKFDPDSEKMAKLELKH |
| | | KDWFEFMQTRGD |
| 17 | Cas12 | MASSHFISLDNSFSKFTNLYSLSKTLRFELVPTENTTVMLENNNVFKKD |
| | | QIIQVKYEKTKPFIDRLHREFIKEALSNYAVSGLQEYFEILRAGGKKANLD |
| | | SAKKQLRKHVVDQFNATASLWVSRHKDVGFKGEGIELLFKEAVFKLLK |
| | | EKYGTDMNALIEDNHGKQISIFDSWKGFTGYFDKFQQTRRNLYKDDG |
| | | KEGRVATRIIDQNLTRFCDNIFVYEKIKDKVSFIDVEKSFGKTCSEVFIPD |
| | | YYNTCLLQDGIDSYNEFIGGKPLENGEKVQGLNELINLYRQTTGDKVPY |
| | | FKKLEKQILGEKDEVFIDEITDEDFVPRVLAFYRTVDAKYKLFLKLLDDFV |
| | | TNQDVYELSQIYISKKGLQEKLYRWLTPSAREVYDEELFEVLKKAKKVN |
| | | NKDKQKVSGYVPDFVEVLYIKQALENIDAKLIWSDRYYSDGENEGIIDK |
| | | GFSSWKQFLVILNHEYRQLLSFEDHVIIDKELDFDKEVKQLTDTVEIVSQ |
| | | DKNARTVTYRGGYDVYKAKLAELGQSFEKDTCTKKVIKNFADSVLSMY |
| | | HFAMMFAVWDDTYPLDVFYTNNEFGYLLYYEDAYKNIVQEYNKLRN |
| | | YLTKKPYSTEKWKLNFENPTLAAGFDKNKESDNSTVILRQGDKYFLGV |
| | | MKKGFNKlFDNSQISQTGNSPEAYFEKMVYKYTKDVVTGIPKSSTQVK |
| | | EVQEHFRNSDEDFFLEECSSVGNFIVPLKITKEIFDLNNKVYAKEDISQA |
| | | MYRWALNTDEEKNYVKSFQKSYLSLGGSPELYCKSVTLWIGFCLNFLK |
| | | SYPSAAYFDYSQLRQASDYESVDECYQELNNAGYTILFQNVSEKYVRV |
| | | KNKNGELYLFQIKNKDWNEGSTGKKNLHTLYFESLFSKENAKQGFPFK |
| | | LSGNAELFFRPGSIEQTYERRNFPREIPLKRRYSKDGIFFHIPVQVNRTK |
| | | VGSPNQFNKEVNDFLAGNPNINIIGVDRGEKHLVYYSVISQNGEKIDG |
| | | GSFNEINGQDYHDKLEKRAKEREQQRRDWETVEGIKDLKKGYISQVV |
| | | KKLADLAIEHNAIIVMEDLNMRFKQIRGGIEKSVYQQLEKALIDKLSFLV |
| | | NKGEVDPQKAGHLLKAYQLTAPIDAFKDMGKQTGIMFYTQAAYTSKI |
| | | DPVTGWRPHLYLKYSSVEKAKDDISRFTKIAYKNDRFEFTYNITDFRTQ |
| | | KEWPLKTEWTVCSCVERFRWNKKLANGKGDYEHYPNVTDDFKKLFD |
| | | SVGINYLQENIKSQVVNLDENTNVEFFREFIKLFALVCQIRNTNSEEAG |
| | | NLNDFILSPVEPFFDSRSAEDFGKGLPSNGDENGAYNIARKGMIILNTL |
| | | STFKNDHGSCEGLSWGDLYISDTQWDDFAQSFHG |
| 18 | Cas12 | MDAKEFTGQYPLSKTLRFELRPIGRTWDNLEASGYLAEDRHRAECYPR |
| | | AKELLDDNHRAFLNRVLPQIDMDWHPIAEAFCKVHKNPGNKELAQD |
| | | YNLQLSKRRKEISAYLQDADGYKGLFAKPALDEAMKIAKENGNESDIE |
| | | VLEAFNGFSVYFTGYHESRENIYSDEDMVSVAYRITEDNFPRFVSNALI |
| | | FDKLNESHPDIISEVSGNLGVDDIGKYFDVSNYNNFLSQAGIDDYNHII |
| | | GGHTTEDGLIQAFNVVLNLRHQKDPGFEKIQFKQLYKQILSVRTSKSYI |
| | | PKQFDNSKEMVDCICDYVSKIEKSETVERALKLVRNISSFDLRGIFVNKK |
| | | NLRILSNKLIGDWDAIETALMHSSSSENDKKSVYDSAEAFTLDDIFSSVK |
| | | KFSDASAEDIGNRAEDICRVISETAPFINDLRAVDLDSLNDDGYEAAVS |
| | | KIRESLEPYMDLFHELEIFSVGDEFPKCAAFYSELEEVSEQLIEIIPLFNKA |
| | | RSFCTRKRYSTDKIKVNLKFPTLADGWDLNKERDNKAAILRKDGKYYLA |
| | | ILDMKKDLSSIRTSDEDESSFEKMEYKLLPSPVKMLPKIFVKSKAAKEKY |
| | | GLTDRMLECYDKGMHKSGSAFDLGFCHELIDYYKRCIAEYPGWDVFD |
| | | FKFRETSDYGSMKEFNEDVAGAGYYMSLRKIPCSEVYRLLDEKSIYLFQI |
| | | YNKDYSENAHGNKNMHTMYWEGLFSPQNLESPVFKLSGGAELFFRK |
| | | SSIPNDAKTVHPKGSVLVPRNDVNGRRIPDSIYRELTRYFNRGDCRISD |
| | | EAKSYLDKVKTKKADHDIVKDRRFTVDKMMFHVPIAMNFKAISKPNL |
| | | NKKVIDGIIDDQDLKIIGIDRGERNLIYVTMVDRKGNILYQDSLNILNGY |
| | | DYRKALDVREYDNKEARRNWTKVEGIRKMKEGYLSLAVSKLADMIIE |
| | | NNAIlVMEDLNHGFKAGRSKIEKQVYQKFESMLINKLGYMVLKDKSID |
| | | QSGGALHGYQLANHVTTLASVGKQCGVIFYIPAAFTSKIDPTTGFADLF |
| | | ALSNVKNVASMREFFSKMKSVIYDKAEGKFAFTFDYLDYNVKSECGRT |
| | | LWTVYTVGERFTYSRVNREYVRKVPTDIIYDALQKAGISVEGDLRDRIA |
| | | ESDGDTLKSIFYAFKYALDMRVENREEDYIQSPVKNASGEFFCSKNAG |
| | | KSLPQDSDANGAYNIALKGILQLRMLSEQYDPNAESIRLPLITNKAWLT |
| | | FMQSGMKTWKN |
| 19 | Cas12 | MVNKQNERGDFDDLTNLYEISKTLRFELVPVGETDRMLKEENVFKVD |
| | | ENIKRKYQQTKLFFDRIHREFAKEALSVEGILSELEEYLAIFIEWRKDKKI |
| | | HEKTLNQKEKELRKQVVSAFNAMANKWIERYGDVNLKKKNVEFLFEE |
| | | GIFRVLKERYGEEDGSTITASDTGEVFSIFDSWKGFTGYFAKFFETRKNF |
| | | YKDDGTATAIATRIVDENLRRFCDNLIVAQRLTENIDFSEVENNFQIKIK |
| | | EVLFMEFYNKCLLQDDIDFYNKVIGGETLKTGEKLKGINELVNLHRHKT |
| | | GEKLPFLKTLDKQILGRKEQFLDEIESEEELLEKLKDFQNVATKKIKVIKSL |
| | | FGDFVENNENYDLEKIYISKKAFNTISRKWTGETEQFEKLLFESMKSDK |
| | | PAGLKYDKKENNYKFPDFIAVSYIKDALENFSGEQKFWKDRYYIELELD |
| | | NQVVWKQFLDIFYWEFSSLFKRSFVNKETGEISEVGCDIFEKKFINLIDD |
| | | FEYNQKSKILIKDFADSVLSVYQMANYFSLEKKRKWSTEFETDSKFYDD |
| | | SEIGFRNCFYEDVFEGIVQ.VYNKLRNYLTKKPFSEEKWKLNFENPTLAA |
| | | GWDKNKEKDNSTVILRKDEKYFLAIMKKGNNVIFDDRNKALFSQNLE |
| | | HGKYEKWYKFAKDVTLGIPKSTTQTKSVIAHFKNSDEDYQITNGSAVG |
| | | DFLEPLVVTKRIFELNNKIYSKNNLGKVLYRSEVSKDKQKEYIKLFQKKYL |
| | | VLGGNKNLYRDAVKEWIDFCKSFIKVYPSYKYFDFSLLKEAVEYNSVDE |
| | | FYKELNSYGYAISFQDISCDYIEEKNKNGELYLFQIKNKDWNKGSTGMK |
| | | NLHTLYFESLFSEENIKNNFVTKLNGGAEIFYRPKTSKEKLGRKKIVRNG |
| | | QEVFVVNHKRYSEDKIFFHCSIALNRGKGKLLKFNARINDLLANNPDIN |
| | | VIGVDRGEKHLAYYSIIDQKCKILDSGTLNEVGAKVDYHEKLSNRAKKR |
| | | EDGRRDWGWGQIEDIKNLKKGYVSQVVHKLAELIIKYNAILVFEDLN |
| | | MRFKQIRGGIEKSIYQQLEKALIDKLNFLVKKGEKDSKSAGHLLKAYQL |
| | | AAPFETFDKMGKQTGVIFYTQASYTSKIDPITGWRPNLYLKHSNANDS |
| | | QKKIAKFSRIEFINDRFEFEYDLKKFIEMKEVPENTKWTLCSCVQRYRW |
| | | NRKLNANKGGYDSYNDLTKNFKALFESVGIDIKKNIKEQIVKMEIKGNE |
| | | KFFKSFIFYWQLLCQIRNTDELKKGDDNDFILSPVEPFFDSRKKNGDDL |
| | | PKNGDDNGAYNIARKGVIVLNKISEFSKQNGNCEKCGWKELYVSAKD |
| | | WDDFVQAK |
| 20 | Cas12 | MQNKQSFADFTNLYSLSKTLRFELKPIGQTQAMLDENKIFEVDENRKK |
| | | AYDKTKPYFDRLHREFINESLSNAQLKGISEYFETFKQFRSNQNNKDLK |
| | | ELINKQQKFLRHQIVTLFDENGKHWATTKYAHLKIKKKNLDILFDEQVF |
| | | YILKERYGSEKETQLVDKETGAVTSIFDNWKGFTGYFTKFFETRKNFYK |
| | | SDGTSTALATRIIDQNLNRFFDNLETFHKIKDKIDVKEVEIFFKLKADNV |
| | | FSIDFYNQCLLQNGIDKYNDFLGGQTLENGEKQKGINEIINKYRQDNK |
| | | DQKLPFLKKLDKQLSEKDRFINEIESKEEFFQVLTEFYQSATVKVTIIKTL |
| | | LNDFVHNTDKYKLEKIYLTKEAFNTIANKWTDETQIFEDNLDLVLKNKK |
| | | ITAKQDFIPLAYIKEALEVIEKDRKFFKDRYYNDPQIGFFPDQSYWEQFL |
| | | AILNFEFMTHFQRVAKDKITGKKIELGYFVFEKRIKELLDSDPSLNSQSKI |
| | | IIKEFADEVLHIFQMAKYFALEKKREWKGDYYQLDDQFYNHIDYGFKD |
| | | QFYENAYEKIVQPYNKIRNYLTKKPYSDVKWKLNFGNPTLANGWDKN |
| | | KEADNTAVILKKDGNYYLGVMKKGKNKIFSDQNKEKYKAYNSAYYEKL |
| | | VYKLFPDPSKMFPKVCFSKKGLNFFQPSEEILRIYKNNEFKKGNTFSISS |
| | | MQKLIAFYIDCLGLYEGWKHYEFKNIKDVRQYKENIGEFYADVAESGY |
| | | KLWFEKISEEYITQKNQLGELFLFQIYNKDFAKKTTGRKNLHTIYFEELFS |
| | | QTNIDNNFPFKLNGQAELFYRPKSLEKIEEKRNFKRSIVNKKRYTQNKIF |
| | | FHVPITLNRTSENIGRFNVRVNNFLANNSNVNIVGVDRGEKNLAYYSII |
| | | KQNGEVLKSGSLNIINGVDYHALLTDRAQRREQERRNWQDVESIKDL |
| | | KRGYISQVVHELVSLAIKYNAIIVMEDLNMRFKQIRGGIEKSTYQQLEK |
| | | ALIEKLNFLVNKEETDSNQAGNLLNAYQLTAPFKTFKDMGKQTGIIFYT |
| | | QASYTSKIDPLTGWRPNIYLRYSNAKQAKADILMFTNIYFSEKKDRFEF |
| | | TYDLEKIDDKRKDLPIKTEWTVCSNVERFSWEKSLNNNKGGYVHYPIQ |
| | | DSNGEESITSKLKKLFMDFGIDLTDIKTQIESLDTNKKDNANFFRKFIFYF |
| | | QLICQIRNTQVNKSDDGNDFIFSPVEPFFDSRFADKFRKNLPKNGDEN |
| | | GAYNIARKGLIILHKISDYFVKEGSTDKISWKDLSISQ.TEWDNFTTDK |
| 21 | Cas12 | MDKQKNKLQNFTNLYELSKTLRFELKPVGETQHLLEENKVFGIDGNIK |
| | | KKYEATKPFFDRLHRKFVKEALVNIALGGLDNYLEVYKKFTNDRKDKEN |
| | | QKELEKQEKLLRKQIKIFFDSQANQWKEKYNKINFKKSGLNILFEESIFQ |
| | | LLKEIYGKEDDAFLKNDDNEFIFDKDGNKISIFDSWKGFTGYFKKFFETR |
| | | KNFYKDDGTSTAIATRIIDQNLRRFCDNIFIYNKIKNKLDFSSLEKEQDV |
| | | VLEEIFTTAYYMDCILQDDIDLYNGVLGGETLDDGTKIKGLNEIINKYRQ |
| | | DNKGDKIPFFKKLDKQILSEKDRKFLDEIESEEELAELLKIFINNTEAKVKV |
| | | FDELVNQLCVNDSDFELDKIYISKEAFNTISHKWTNQTHEFERVLFEEM |
| | | KPDKITGLDYKKAEDKYKFPDFIALKYIIKSLNTLDKDSEFWKSHYYKTEE |
| | | NQNAILSLEEKVGEQFLQIYKYELQRLHSRNVNVENKDGKMKEKEIGL |
| | | DYSLTTVKELLKNFKLTDKSKIIIKDFADNVLQYYQLAKYFSVEKNREWN |
| | | YTKLELADFYINPDFGYEIFYGNAYEEIIQJYNKLRNYLTKKPFSEEKWKL |
| | | NFENPTLAGGWDKNKERGNATVILRKNEKYYLGIMAKGYNDIFTDKN |
| | | KDKFDGEGYEKMVYKLFPGPNKMMPKVCFSKKGLDFFEPSEKIIDIYK |
| | | DGKFKQGDTFSIDSMQQLIDFYKRALREYNGWKMYDFSKLKDTNDYT |
| | | TNIGEFYNDVACAGYKVWFDNISEEYIQEKNENGELYLFEIHNKDWNL |
| | | KDEKKKTGTKNLHTLYFESLFSDENALRDFVMKLSGEAELFFRPKTNAD |
| | | KLGYRKDKKGNKVVKNKRYSEDKMFLHLSINLNRGKGQAFWFNRNIN |
| | | NFLANNSDINVIGIDRGEKHLAYYSVISQQGEILDNGSLNEIAGVDYYA |
| | | KLSKRAKEREGQRKDWQAVSDIKNLKKGYISQVVRKLADLAIEHNAIIV |
| | | LEDLNMRFKQIRGGIEKSIYQQLEKALIEKLNFLVNKKEIDSDKAGNLLR |
| | | AYQLTAPFETFQKMGKQTGIIFYTQASYTSKIDPLTGWRPNLYLKKGN |
| | | AKINKEQIEKFSKIEFTNNRFEITYDLKNFGDKKKKYPQKTKWTLCSSVE |
| | | RWRWDRKLNNNKGGYIHYEDLTTEFKSLFEKFEIDIEGDILEQIKTIDEN |
| | | DRNNARLFSGFIYLWGLLSQIRNTDGELDEKIKKLEREDKNEEISEKEKF |
| | | DVDFILSPVEPFFDSRTPEKFGENLPKNGDDNGAYNIARKGHTLERIKK |
| | | FYELSDKEREKLKYPDLFITNAEWDDFATKRDS |
| 22 | Cas13 | MDNNTTLEKTELGLGITYNHDKVEDKHYFGGFFNLAQNNIDLVAQEF |
| | | KKRLLVQGKDSINIFSNYFSDQCSITNLERGIKVLSEYFPVIFYFDLDENN |
| | | KSKSIRQH11LLLDTINNLRNYYTHYYHKKVIIDDALYPLLDTILLKVVLEIK |
| | | KKKLKEDKTKQLLKKGLEKEMAILFNLMKKEQKEKKIKGWNIDKNIKG |
| | | AVLNRAFSHLLYNDGISDYRKSKSNTEDENLKDTLSESGILFLLSFFLNKK |
| | | EQEQLKANIKGYKGKIASIPDEEITLKNNSLRNMATHWTYSHLTYKGLK |
| | | HRIKTDHEKETLLVNMVDYLSKVPNEIYQNLSEQNKSLFLEDINEYMR |
| | | DNEENNDSSEASRVIHPVIRKRYENKFAYFAIRFLDEFAEFPTLRFMVN |
| | | VGNYIHDNRKKDIGGTSLITNRTIKQQINVFGNLTEIHKKKNDYFEKEE |
| | | NKEKILEWELFPNPSYHFQKENIPIFIDLEKSKETNELAKEYAKEKKKIFG |
| | | SSRKKQQNTAKKNREAIINLVFDKYKTSDRKTVTFEQPTALLSFNELNA |
| | | FLYAFLVENKTGKELEKIIIEKIANQYQILKNCSSTVDKTNDSIPKSIKKIA |
| | | HPTTDSFYSEGKKIDIEKLERDIKIEIEKTNEKLETIKENETSAKNYKRNER |
| | | DIQKRKLYRKYVFFTNEIGIEATWITNDILRFLDNKENWKGYQHSELQK |
| | | FISQYDNYKKEALGLLESEWNLESEAFFGQKLKRIFQSNFTFETFYKKYL |
| | | DNRKDTLETYLSAIENLKTMTDVPPKILKKSWAELFRFFDKKIYLLSTIET |
| | | KINELITKPINLSRGVFDEKPTFINGKSPNKENDQHLFANWFIHAKEQTI |
| | | FQDFYNLALETPKEINNLKKQNYKLERSINNLKIEDIYIKQMVDFLYQKL |
| | | FEQSFKGSLQDLYTSKEKREVEKSKAKNEQ.TPDESFIWKKQVEINALN |
| | | GRIIAKTKIKDIGKFKNLLTDNKITHLISYDNRIWNFSLDNDGDTTKKLYS |
| | | LNTELESYERIRREKLLKQIQEFEQFLLKQETEYSAERKHPEKFEKDGNP |
| | | NFKKYIIEGMLNKITPVNEIEELEILKSKEDVFKIDFNEIVKLNNESIKKGY |
| | | LLIMIRNKFAHNQLIDKNLFTFSLQLYSKNENENFSEYLDKVCQKIIQEFI |
| | | EKLK |
| 23 | Cas13 | MNETDYLAKRLEYNYASIEDKHYFGGYFNLAQNNINDLSKAFKEKFG |
| | | MKPKSCILDFFTQDKAIAEYQLGVEFLQKNLPVIRYLYLPTSHKRFENVP |
| | | KNQLISEQRNYFKNSLKVLKNLIRDYRNFYTHHFHKPIPVFPETYKLLDD |
| | | LFLAVANDVKKHRMKTDASKQLLKKGLIEELAQLEKLKLEDLKKLKREG |
| | | KKVNLNDKEAITNAILNDSFSHLLPKENTISKYYSAVPTEDIDTENGVTIS |
| | | ESGIIFLLGLFLTKKQSEDLRSRVKGFKAKLIVNPENPINKKNNSLKYMA |
| | | THWVFGYLGFKGLKNRFTTTFTKDTLLAQIVDELSKVPDELYQVLPEEL |
| | | KNEFLEDMNEYLKEENSESLDKATVIHPVIRKRYENKFAYFALRFLDEFV |
| | | DFPTLRFQLHLGNYVHDKREKPIEGTKYVTERIVKEKIKAFAKLSEAAQL |
| | | KQKYFEEKENHQSIGLQLYPNPSYNFVGNNIPIHLNLNEHFFPKEVKIV |
| | | AGRLKKRNSSYKSDHPEEYKVRTDNKIKPDAILQDLGKPEKLAPVAML |
| | | SLNELPALLHLVLTKKTPEEIEIIIAQKIAERYNVLTNYKAGDDISKGQITK |
| | | NLLKAKQKKEVNLDKLQLAIEKEIAVTNDKLQTIALHIKERNDPKQKRK |
| | | YVFTNKEIGLQVTWLANDLKRFMPKGSRQNWRGQHHSQLQKSLAFY |
| | | DIQPKEPLSLLEEVWDFKNEAYLWNNGIRRSFDKRDFISFYTSYLNNRK |
| | | ETFQRFKDQLNGIRSNKKILDKFIKQQHLWNLFHKRLYVIDTIEEQVEKL |
| | | LVKPMQFPKGVFDHKPTYIKGKSIQENPECFADWYVAWNQHTDYQK |
| | | FYSWDRDYKSAYLSGEQEKTEKRFIRVQGSKINKVKQQDVLLAKMASII |
| | | FNELYLPEDAEHLDLNLSDIYKTQTERKAEIEAALIQSHKTTGDNSANIIK |
| | | STSAWTLTVPYCSKNIYEPQVKLKELGKFKKFIASQKVQTLFEYKPQKI |
| | | WNKTELEEVLELKANSYEVIRRDYLLKSIQEFEKYMIKKLPTLIDTNEHP |
| | | NFNKYLTTFLKSLELVSEEDAKWLISKKDFDTTPIDELKKQSKIMEKAFLL |
| | | VMIRNKFSHNQLPRKIYYDEIYKNVPNAVSINFNELFLEYTNQTILEFK |
| 24 | Cas13 | MESIIGLGLSFNPYKTADKHYFGSFLNLVENNLNAVFAEFKERISYKAK |
| | | DENISSLIEKHFIDNMSIVDYEKKISILNGYLPIIDFLDDELENNLNTRVKN |
| | | FKKNFIILAEAIEKLRDYYTHFYHDPITFEDNKEPLLELLDEVLLKTILDVK |
| | | KKYLKTDKTKEILKDSLREEMDLLVIRKTDELREKKKTNPKIQHTDSSQIK |
| | | NSIFNDAFQGLLYEDKGNNKKTQVSHRAKTRLNPKDIHKQEERDFEIP |
| | | LSTSGLVFLMSLFLSKKEIEDFKSNIKGFKGKVVKDENHNSLKYMATHR |
| | | VYSILAFKGLKYRIKTDTFSKETLMMQMIDELSKVPDCVYQNLSETKQK |
| | | DFIEDWNEYFKDNEENTENLENSRVVHPVIRKRYEDKFNYFAIRFLDEF |
| | | ANFKTLKFQVFMGYYIHDQRTKTIGTTNITTERTVKEKINVFGKLSKMD |
| | | NLKKHFFSQLSDDENTDWEFFPNPSYNFLTQADNSPANNIPIYLELKN |
| | | QQIIKEKDAIKAEVNQTQNRNPNKPSKRDLLNKILKTYEDFHQGDPTAI |
| | | LSLNEIPALLHLFLVKPNNKTGQQIENIIRIKIEKQFKAINHPSKNNKGIP |
| | | KSLFADTNVRVNAIKLKKDLEAELDMLNKKHIAFKENQKASSNYDKLLK |
| | | EHQFTPKNKRPELRKYVFYKSEKGEEATWLANDIKRFMPKDFKTKWK |
| | | GCQHSELQRKLAFYDRHTKQDIKELLSGCEFDHSLLDINAYFQKDNFE |
| | | DFFSKYLENRIETLEGVLKKLHDFKNEPTPLKGVFKNCFKFLKRQNYVTE |
| | | SPEIIKKRILAKPTFLPRGVFDERPTMKKGKNPLKDKNEFAEWFVEYLE |
| | | NKDYQKFYNAEEYRMRDADFKKNAVIKKQKLKDFYTLQMVNYLLKEV |
| | | FGKDEMNLQLSELFQTRQERLKLQGIAKKQMNKETGDSSENTRNQTY |
| | | IWNKDVPVSFFNGKVTIDKVKLKNIGKYKRYERDERVKTFIGYEVDEK |
| | | WMMYLPHNWKDRYSVKPINVIDLQIQEYEEIRSHELLKEIQNLEQYIY |
| | | DHTTDKNILLQDGNPNFKMYVLNGLLIGIKQVNIPDFIVLKQNTNFDKI |
| | | DFTGIASCSELEKKTIILIAIRNKFAHNQLPNKMIYDLANEFLKIEKNETY |
| | | ANYYLKVLKKMISDLA |
| 25 | Cas13 | MEDKTTGAGISYDHTLMEDKHFFGGFLNLAQNNIDALLKAFKERFNV |
| | | RYQSKQFAEVCFSDKLPDQDYLDRTLFLETHLPFIKYIGGKEANNRGTF |
| | | RKNITLFFESIEQLRNFYTHYYHKPILFPEELYENLDRIFVEVSKEVKTHKV |
| | | KNDQTRHLLTKNLANELDIRYKKNVEKLKELKAQGKKVNIHDKEAIKNS |
| | | VLNNAFNHLIYKKEEDVFATEAYKSKYNLEDPSKNGISLSQSGLLFLLSM |
| | | FLNKKDIEALKSRVKGFKAKIIRDGEENISGLKFMATHWVFSSLSFKNV |
| | | KHKLSTDFHKETLLIQIVDELSKVPDEVYKTFDKQTQEEFIEDINEYMKV |
| | | GNKDLSLEESTVIHPVIRKRYDNKFNYFALRFLDEFAGFPTLRFQVHIGN |
| | | YIHDRRIKNIDGTAFQTERSVKERIKVFGKLSQMSNLKAEYVSGLMDEP |
| | | VDTGWEIFPNPSYNIIENNIPIYIEMGDHFNDEVLQSKMARKKQKPEE |
| | | LKDRNSAKASKESMIQTLQNDKGLMDVITVSPTAQLSLNELPAILYELL |
| | | VKKTPAKTIEKKLVGKLNQRLKEIKNYNPEKPLPASQISKRLRLNREEGSI |
| | | NTKKIIALLQKELNYTQEKLDLLEKNRKEYGKKVDGKILRKYVFGLKEIG |
| | | NLATDMAMDIKRFMPANVRKEWKGYQHSQLQQSLAFYDKRPEEAF |
| | | NILQEVWDINREKSLWDTWILNAFQTSGNFERFFELYHEGRKKYIQQ |
| | | QLENIDRYTDNKKFLQKFINQQFPTNFLEKRLYTLESLEIEKLKILSKPFIL |
| | | PRGTFDEKPTFIMGEKVTENPELFADWYTYGYQQHEFQKFYSWPRDY |
| | | KDLLQNEQKRDPDFAENKKGLSDLKQLELLQLKQD111KKIKTQDLYLKLI |
| | | MDALFIEVFGQEADISLNDLYLTQEERLEKEKLALKQHQRVEGDDSPN |
| | | VIKDNFIWSKTMPYKHDKIYEPQVRLKDFGKFKHFLLDDKVAKILSYDL |
| | | QETWNKNELEIQINTGQDSYEVIRREELLKEIQLLEKQILETFSHTLDEH |
| | | PKEFEDEKGNPNFKMYMANGVIRKGSSTTAKDEADWLEHEKDFDNL |
| | | SLEIFNSKSEITQLTFLIVLIRNKFGHNQLPIKQFYEIIQNEYSITGETISRLY |
| | | LNFIIYAKARLKDLM |
| 26 | Cas13 | MEEKLGKGVEYNPFKKEDKYYFGGYFNLAENNINEVFKEVKKRLGETN |
| | | SSSNIELLNNVFRKEMSLVDYEKWVNAFADYFPIVNYLDRETIKKGEKV |
| | | VEVPREKRIECFRDMFKGLINTISQLRHYYTHYHHEPIEIDDKILSFLDEV |
| | | LFNTIITTKNKYLKTDKTKELIKDSLQEELDILCKLKVKYLESKRKRFDRKD |
| | | KGAIENAVYNDVFRRFIYKDEKGNESLKDIIRTKQIKVHQNSSYLELPISS |
| | | SGIIFLLSLFLNKKEVESLKSNIRGYKGKSKSEETTPEKNGLLFMTTHRIYS |
| | | VLAYKGLKKRIKTSVKGDKETLLMQMIDEVSKVPHCIYQNLDQTLQAT |
| | | FIEDWNEYFKDNEENEENLENSRVLHPVIRKRYEDKFNYFAIRFLDEYA |
| | | EFPSLRFQVNLGNYVHHKATKKFGNSEVTTERVIKDKITVFGRLSEVNK |
| | | AKADFFKNETELDPAWELFPNPSYEFPKEKGNNDKDAGKIGIQVKLLN |
| | | KDIEAVLNESKNTLNNKTRKSDKISKKEIINKIVQINDDTKYNNKNIIYQ |
| | | GNAIAYLSLNDIHSLLYELLVIGTKGDKLERKVVEKIQQQVTEIRNKDTS |
| | | AKILSKYKDSEESNTIDKKKLVIDLKYEYDKLQDLLKEHKNREEDYIQTKK |
| | | KKKDSPKRKYILYHNEKGQVAVWLSNDIKRFMPQNFKEKWKGYQHS |
| | | EFQKSLAYYETNKEMLKIILQDLDLEQFPFDIKSCFYKNTLEDFYNRYLSL |
| | | RISYLENVIDRVECFSNEPKAFKSVLKECFVFLKKQNYTNHSLDEQVKKI |
| | | LANPIFIERGFLDTKPTMIQGVKFSENKGCFADWFVHYKEYEHYOKFY |
| | | DTNLYPVESIEDKERQKLEATIKKQQKNDVFTLLMIKKIFNDLFNQDFE |
| | | ANLYEMYQSKEEREKNQLVAKETQNRNLNFIWNKPIAIDLFDGKVKID |
| | | EVKLKDVGSFRKYENDKRVQTFITYIPEIQWIPYLPNTWEGINLPVNVIE |
| | | ROIDRYEKVRSEELLKEVQAIEKYIYEQVNDKTELLONGNQNFKNYLVN |
| | | GLLKQIQGIDVSNFKFINQQKFETINVKDLDNEASALEQKVYVLINIRN |
| | | QFSHNQFPKSAFYQFCQKILSIEEDELFADYYLRLFKLLRNELLD |
| 27 | Cas13 | MNTRVTGMGVSYDHTKKEDKHFFGGFLNLAQDNITAVIKAFCIKFDK |
| | | NPMSSVQFAESCFTDKDSDTDFQNKVRYVRTHLPVIGYLNYGGDRNT |
| | | FRQKLSTLLKAVDSLRNFYTHYYHSPLALSTELFELLDTVFASVAVEVKQ |
| | | HKMKDDKTRQLLSKSLAEELDIRYKQQLERLKELKEQGKNIDLRDEAGI |
| | | RNGVLNAAFNHLIYKEGEIAKPTLSYSSFYYGADSAENGITISQSGLLFLL |
| | | SMFLGKKEIEDLKSRIRGFKAKIVRDGEENISGLKFMATHWIFSYLSFKG |
| | | MKQRLSTDFHEETLLIQIIDELSKVPDEVYHDFDTATREKFVEDINEYIR |
| | | EGNEDFSLGDSTIIHPVIRKRYENKFNYFAVRFLDEFIKFPSLRFQVHLG |
| | | NFVHDRRIKDIHGTGFQTERVVKDRIKVFGKLSEISSLKTEYIEKELDLDS |
| | | DTGWEIFPNPSYVFIDNNIPIYISTNKTFKNGSSEFIKLRRKEKPEEMKM |
| | | RGEDKKEKRDIASMIGNAGSLNSKTPLAMLSLNEMPALLYEILVKKTTP |
| | | EEIELHKEKLDSHFENIKNYDPEKPLPASQISKRLRNNTTDKGKKVINPE |
| | | KLIHLINKEIDATEAKFALLAKNRKELKEKFRGKPLRQTIFSNMELGREA |
| | | TWLADDIKRFMPDILRKNWKGYQHNQLQQSLAFFNSRPKEAFTILQD |
| | | GWDFADGSSFWNGWIINSFVKNRSFEYFYEAYFEGRKEYFSSLAENIK |
| | | QHTSNHRNLRRFIDQQMPKGLFENRHYLLENLETEKNKILSKPLVFPR |
| | | GLFDTKPTFIKGIKVDEQPELFAEWYQYGYSTEHVFQNFYGWERDYN |
| | | DLLESELEKDNDFSKNSIHYSRTSQLELIKLKQDLKIKKIKIQDLFLKLIAG |
| | | HIFENIFKYPASFSLDELYLTQEERLNKEQEALIQSQRKEGDHSDNIIKD |
| | | NFIGSKTVTYESKQISEPNVKLKDIGKFNRFLLDDKVKTLLSYNEDKVW |
| | | NKNDLDLELSIGENSYEVIRREKLFKKIQNFELQTLTDWPWNGTDHPE |
| | | EFGTTDNKGVNHPNFKMYVVNGILRKHTDWFKEGEDNWLENLNET |
| | | HFKNLSFQELETKSKSIQTAFLIIMIRNQFAHNQLPAVQFFEFIQKKYPEI |
| | | QGSTTSELYLNFINLAVVELLELLEK |
| 28 | Cas13 | METQILGNGISYDHTKTEDKHFFGGFLNTAQNNIDLLIKAYISKFESSPR |
| | | KLNSVQFPDVCFKKNDSDADFQHKLQFIRKHLPVIQYLKYGGNREVLK |
| | | EKFRLLLQAVDSLRNFYTHFYHKPIQLPNELLTLLDTIFGEIGNEVRQNK |
| | | MKDDKTRHLLKKNLSEELDFRYQEQLERLRKLKSEGKKVDLRDTEAIRN |
| | | GVLNAAFNHLIFKDAEDFKPTVSYSSYYYDSDTAENGISISQSGLLFLLS |
| | | MFLGRREMEDLKSRVRGFKARIIKHEEQHVSGLKFMATHWVFSEFCF |
| | | KGIKTRLNADYHEETLLIQLIDELSKVPDELYRSFDVATRERFIEDINEYIR |
| | | DGKEDKSLIESKIVHPVIRKRYESKFNYFAIRFLDEFVNFPTLRFQVHAG |
| | | NYVHDRRIKSIEGTGFKTERLVKDRIKVFGKLSTISSLKAEYLAKAVNITD |
| | | DTGWELLPHPSYVFIDNNIPIHLTVDPSFKNGVKEYQEKRKLQKPEEM |
| | | KNRQGGDKMHKPAISSKIGKSKDINPESPVALLSMNEIPALLYEILVKK |
| | | ASPEEVEAKIRQKLTAVFERIRDYDPKVPLPASQVSKRLRNNTDTLSYN |
| | | KEKLVELANKEVEQTERKLALITKNRRECREKVKGKFKRQKVFKNAELG |
| | | TEATWLANDIKRFMPEEQKKNWKGYOHSQLQQSLAFFESRPGEARS |
| | | LLOAGWDFSDGSSFWNGWVMNSFARDNTFDGFYESYLNGRMKYFL |
| | | RLADNIAQQSSTNKLISNFIKQQMPKGLFDRRLYMLEDLATEKNKILSK |
| | | PLIFPRGIFDDKPTFKKGVQVSEEPEAFADWYSYGYDVKHKFQEFYAW |
| | | DRDYEELLREELEKDTAFTKNSIHYSRESQIELLAKKQDLKVKKVRIQDL |
| | | YLKLMAEFLFENVFGHELALPLDQFYLTQEERLKQEQEAIVQSQRPKG |
| | | DDSPNIVKENFIWSKTIPFKSGRVFEPNVKLKDIGKFRNLLTDEKVDILL |
| | | SYNNTEIGKQVIENELIIGAGSYEFIRREQLFKEIQQMKRLSLRSVRGMG |
| | | VPIRLNLK |
| 29 | Cas13 | MENQTQKGKGIYYYYTKNEDKHYFGSFLNLANNNIEQIIEEFRIRLSLK |
| | | DEKNIKEIINNYFTDKKSYTDWERGINILKEYLPVIDYLDLAITDKEFEKID |
| | | LKQKETAKRKYFRTNFSLLIDTIIDLRNFYTHYFHKPISINPDVAKFLDKN |
| | | LLNVCLDIKKQKMKTDKTKQALKDGLDKELKKLIELKKAELKEKKIKTW |
| | | NITENVEGAVYNDAFNHMVYKNNAGVTILKDYHKSILPDDKIDSELKL |
| | | NFSISGLVFLLSMFLSKKEIEQFKSNLEGFKGKVIGENGEYEISKFNNSLK |
| | | YMATHWIFSYLTFKGLKQRVKNTFDKETLLMQMIDELNKVPHEVYQT |
| | | LSKEQQNEFLEDINEYVQDNEENKKSMENSIVVHPVIRKRYDDKFNYF |
| | | AIRFLDEFANFPTLKFFVTAGNFVHDKREKQIQGSMLTSDRMIKEKINV |
| | | FGKLTEIAKYKSDYFSNENTLETSEWELFPNPSYLLIQNNIPVHIDLIHNT |
| | | EEAKQCQIAIDRIKCTTNPAKKRNTRKSKEEIIKIIYQKNKNIKYGDPTAL |
| | | LSSNELPALIYELLVNKKSGKELENIIVEKIVNQYKTIAGFEKGQNLSNSLI |
| | | TKKLKKSEPNEDKINAEKIILAINRELEITENKLNIIKNNRAEFRTGAKRK |
| | | HIFYSKELGQEATWIAYDLKRFMPEASRKEWKGFHHSELQKFLAFYDR |
| | | NKNDAKALLNMFWNFDNDQLIGNDLNSAFREFHFDKFYEKYLIKRDEI |
| | | LEGFKSFISNFKDEPKLLKKGIKDIYRVFDKRYYIIKSTNAQKEQLLSKPIC |
| | | LPRGIFDNKPTYIEGVKVESNSALFADWYQYTYSDKHEFQSFYDMPRD |
| | | YKEQFEKFELNNIKSIQNKKNLNKSDKFIYFRYKQDLKIKQIKSQDLFIKL |
| | | MVDELFNVVFKNNIELNLKKLYQTSDERFKNQLIADVQKNREKGDTSD |
| | | NKMNENFIWNMTIPLSLCNGQIEEPKVKLKDIGKFRKLETDDKVIQLLE |
| | | YDKSKVWKKLEIEDELENMPNSYERIRREKLLKGIQEFEHFLLEKEKFDG |
| | | INHPKHFEQDLNPNFKTYVINGVLRKNSKLNYTEIDKLLDLEHISIKDIET |
| | | SAKEIHLAYFLIHVRNKFGHNQLPKLEAFELMKKYYKKNNEETYAEYFH |
| | | KVSSQIVNEFKNSLEKHS |
| 30 | Cas13 | MEKTQTGLGIYYDHTKLQDKYFFGGFFNLAQNNIDNVIKTFILKFFPER |
| | | KDKDVNAAQFLDICFKDNDADSDFLKKTKFLRMHFPVIGFLASNNDK |
| | | AGFKRKFSLLLKAISELRNFYTHYYHQPIEFPSELFELLDDIFVETTSEIKKL |
| | | KKKDDKTQQLLNKNLSEEYDIRYQQQIERLKELNAQGKKIPLNDETAIR |
| | | NGVFNAAFNHLIYKDGGDLKPSRVYQSSYSEPDPAENGTSLSQSSILFL |
| | | LSMFLERKETEDLKSRVKGFKAKFIKNGEEKISNLKLTATHWVFSYLCFK |
| | | GIKQKLSTEFHEETLLIQIIDELSKVPDEVYSAFGAKTKQKFVEDINEYMK |
| | | EGNADLSLEDSKVIHPVIRKRYENKFNYFAIRFLDEYLSSTSLKFQ.VHVG |
| | | NYVHDRRIKNINGTDFQTERVVKDSIKVFGRLSKISNLKADYIKEQLSLP |
| | | NDSNGWEIFPNPSYVFIDNNVPIHIQTDEATKNGIKLFKDTRRKEQPEE |
| | | LQKRKGKLSKHNIVEIIFKETKGKDKPRVDEPLALLSLNEIPALLYQILEKG |
| | | ATPEDIELIIKNKLAERFEKIKNYDPETPAPASQISKRLRNNTTAKGQETL |
| | | NAEKLSILIEREIEDTETKLDAIEEKRRKAKKEYRRNSPQKSIFSNSELGRI |
| | | AAWLADDIKRFMPAELRKNWKGYQHSQLQQSLAYFEKRPQEAFLLLK |
| | | EGWDTSDGSSYWNIWVINSFSETEDFEKFYENYLRKRAKYFSELAGNI |
| | | KQHTHNAKFLRKFIKQQMPADLFPKRHYILKDLETEKNKVLSKPLVFSR |
| | | GLFDSNPTFIKGVKVTENPELFAEXXNGIATGTKRNIPSSISMAGKETI |
| | | MSF |
| 31 | Cas13 | MEQNKLGKGIDYNPFKTVDKHYFGGFFNLADNNIQEVFDEINIRYKN |
| | | GNLKPKVAIERYTTENTSLVEYEKFVAILTEYFPIVKEIDQKNKKDSNDK |
| | | VIEKTRIERITDFRDAFILFIETIEKLRSYYTHYQHDDITIDNQLFIHLDKILL |
| | | NTVLETKKKYLKTDKTKELLKNSLQAELKELYHLKINQLEQKKNEVDALI |
| | | KEQKSKGKKTDKPFKYSKDRDQIINSIYNDAIRPFLYENANKVELSDKKK |
| | | TAFNEKDASASERDFNLPISSSGIIFLLSCFLNRKEIEDLKANIKGYKGKVI |
| | | KGETFDLEKNSIRFMATHRIYSVMCYKGLKNKIRTSESATKETLLMQMI |
| | | DELSKIPDIVYKNISTDLQNTFTEDWNEYYKDNIENNENLENSKVIHPVI |
| | | RKRYEDKFNYFAIRFLDEFVDFPSLRFQVHLGNYIKHSMPKNIGSVTTT |
| | | REIKNKIFVFGKLNEINQSKNDFFNKNKEEEQETNWEIFPNPNYHFPM |
| | | ENSDELKNANKIGIYIDLKDKRKKDTLNEAIKKREKETSIYKKDLVHQIID |
| | | KNLDMHIGQPVAYLSMNDIHAIIFSILSQNVFTKDNKLNGGDIEKKIKD |
| | | QINNQITEITEKDASIKILKNHSDNNSNYPNTHKLYDDISNEIEXXXXXX |
| | | XXXXXXXXXXXXXXXXXXXXXXXXXXXXXXXXXXXXXXXXXXXXXXXXX |
| | | XXXXXXXXXXXXXXXXXXXXXXXXXXXXXNEIEVLDKLMQKHEKRVKEY |
| | | INTQEDKKYKPARKHILYNSEKGEIATWLANDIKRFFPKEFKENWKGH |
| | | YHSEFQRNLAYYETNKKEVKTILNDLDYRKEIPFIDFSKNTLADFYFEYLK |
| | | KRKIYHKNLWVEVNKLIKGENINKEKLFDNCFRIYKRKNYVSNVIDEKV |
| | | NTILSNPIFIERGFIDEKPTIIPKMPLEGNEEHFAAWFVAFKSFKNNEFQ |
| | | NFYDTNKYPLETKDKTNSELKKIQTKTYNQKKNDWATWLIVQYIFKDIF |
| | | STDLQNVKLSELFQTREQRIQNQVKALDGERNQNFIWNRTIDLQLNE |
| | | KIKIPNVKLKDIGNFRKYVNDSRVEAFLRYNDITQWMAYLPSNWQKE |
| | | DESKPKPVNVIQLQLDDYEKIRREELLKEVQKLEKTIYNNTNVKTVLLQ |
| | | DGNPNFKNYVLNGLLEEIKGINISAFTVLHEKTNFDKIDFNVLENCSEIE |
| | | QSATLIILIRNKFAHNQLPSSDCYQFCSKILTRDTEQTYANYYLKLFMILK |
| | | DKL |
| 32 | Cas13 | MEETTTMGKGVAYDHTLFKDKHYFAGYLNLAVNNIENVFKTVYKNRF |
| | | DIKQHNLYKILDSLDGQISEPDYIERVSFLKQYFPVLHYLDLHPDNKRFT |
| | | KEEDKVKARRRYLINNLRLLIETLSKLRDFYTHYYHKPLSIEQNTFSLIDNI |
| | | FLNVVIDVKRQKKKNDHTRQLLKDSLKEEMDILYQKTKASLKEKQKEN |
| | | TRIKLDSETINNTIFNNSFSHLIYRRKKADNDILSASCKSEYKGEPTENGI |
| | | NVSVDGLLFFLGIFLSRKESNDLRGRIKGFKGTVIKDLPDFPNEKNNSLK |
| | | FMATHWVFTYLNIKPIKQKLNTNFSRETLLLQIVDELTKIPNEIYRNLCF |
| | | KKQQEFVEDINEYIKEGDDIDTLNSSTVIHPVIRKRYENKFNYFVLRYLD |
| | | EFVSFNSLRFQIYLGNYVHHIQRKKLSGTEYETERVIKEKINVFGKLSEVS |
| | | NIKGDYFIQNNPDNEALGWEIYPNPSYNFTGNNIPIYFDINDQDKEKIN |
| | | EYKSIRNFSEKRILRKKNKKNKQEIFDLINNTLTTRVFTAEPTAILSLNELP |
| | | ALLYTILCENKTASEIENLLRRTYLKRLNTIKNYQPGTLPQSKITKNLNKS |
| | | TNQESLDVSKLIKAMKHEISISNEKLTLIKKNQNEVKDTSHRRKYVFNSK |
| | | ELGIEATWLANDLKRFMPKKVRENWKGYMHSQLQNSIAYYSQKPKE |
| | | ALSILSSVWNFNDDNYIWNEGIKKAFNEKEFEKFYCKYLASRNKTLEKL |
| | | KENLDNLEYKTDKRKLDKFIKQQNLDCLFHIRTYTIDSTQEQINKLLAKP |
| | | LVFPRGIFDSKPTFVKNESVTEKPELFADWYTYTYKEHPLQEFYSFTKDY |
| | | ECNFKKEKLTVKEFVKNQEQLNPEEQLNLFKLKEDLSIKCIKNQDLFLKL |
| | | VVDNIYNKIFEYNIDISLKNLYISRKERIAIGLKAKELNQINDSYIWGKTIL |
| | | YQDKQIRETKVQLKDINKIKRFLEEDKVKQILSYDINKQWEIEELKYELYI |
| | | KPNSYEVIRREKLFKAIQEFESYILTINNFDGSNHPSILEYNSNPRFKHYV |
| | | VNGLLLKKGLATNEEIEWLLAKGQKEFNTFDKSIVEKPEIIQKAFLLVLIR |
| | | NKFAHSQLPIKEYYEMIRSYTKNIENLNTTEIIFQFTTNTINELKR |
| 33 | cas12b | MATRSFILKIEPNEEVKKGLWKTHEVLNHGIAYYMNILKLIRQEAIYEH |
| | | HEQDPKNPKKVSKAEIQAELWDFVLKMQKCNSFTHEVDKDVVFNILR |
| | | ELYEELVPSSVEKKGEANQLSNKFLYPLVDPNSQSGKGTASSGRKPRW |
| | | YNLKIAGDPSWEEEKKKWEEDKKKDPLAKILGKLAEYGLIPLFIPFTDSN |
| | | EPIVKEIKWMEKSRNQSVRRLDKDMFIQALERFLSWESWNLKVKEEY |
| | | EKVEKEHKTLEERIKEDIQAFKSLEQYEKERQEQLLRDTLNTNEYRLSKR |
| | | GLRGWREIIQKWLKMDENEPSEKYLEVFKDYQRKHPREAGDYSVYEF |
| | | LSKKENHFIWRNHPEYPYLYATFCEIDKKKKDAKQQATFTLADPINHPL |
| | | WVRFEERSGSNLNKYRILTEQLHTEKLKKKLTVQLDRLIYPTESGGWEE |
| | | KGKVDIVLLPSRQFYNQIFLDIEEKGKHAFTYKDESIKFPLKGTLGGARV |
| | | QFDRDHLRRYPHKVESGNVGRIYFNMTVNIEPTESPVSKSLKIHRDDF |
| | | PKFVNFKPKELTEWIKDSKGKKLKSGIESLEIGLRVMSIDLGQRQAAAA |
| | | SIFEVVDQKPDIEGKLFFPIKGTELYAVHRASFNIKLPGETLVKSREVLRK |
| | | AREDNLKLMNQKLNFLRNVLHFQQFEDITEREKRVTKWISRQENSDV |
| | | PLVYQDELIQIRELMYKPYKDWVAFLKQLHKRLEVEIGKEVKHWRKSL |
| | | SDGRKGLYGISLKNIDEIDRTRKFLLRWSLRPTEPGEVRRLEPGQRFAID |
| | | QLNHLNALKEDRLKKMANTIIMHALGYCYDVRKKKWQAKNPACQIIL |
| | | FEDLSNYNPYEERSRFENSKLMKWSRREIPRQVALQGEIYGLQVGEVG |
| | | AQFSSRFHAKTGSPGIRCSVVTKEKLQDNRFFKNLQREGRLTLDKIAVL |
| | | KEGDLYPDKGGEKFISLSKDRKLVTTHADINAAQNLOKRFWTRTHGFY |
| | | KVYCKAYQVDGQTVYIPESKDQKQKIIEEFGEGYFILKDGVYEWGNAG |
| | | KLKIKKGSSKQSSSELVDSDILKDSFDLASELKGEKLMLYRDPSGNVFPS |
| | | DKWMAAGVFFGKLERILISKLTNQYSISTIEDDSSKQSM |
| 34 | cas12b | MATAVDTSTTRAYTLRLSGGNNWRELLWQTHVAVNRGAWVWGD |
| | | WLLTLRGGLPASLADGDAERRVVLALSWLSVESPASLAPQAHIVAYGS |
| | | DARDERNRKVTERFRDILRRMGIKQQQEQEWLDACLPALMASIREDA |
| | | VWVDRSACFAEAQQCYRGLSSEWARKTLFDFLGGEDDYFKPSAKEG |
| | | ASSKAKDFVQKAGRWLSRHWGAGKKSDPRDISTRLGKLAGVDPKAID |
| | | GHTGRAALEDLLRTLGSRPAQNADAEKLYRQLKRAVGWKGRPSKGA |
| | | VALKKIRDAERVPNDLWKEIASTLREEAAVQSSQTSDHAAVPDWRSH |
| | | WPAEITGLPMPYRVDRDYIWEHGVMLDHALRRVSSAHTWIKRAEAE |
| | | RRRFQQDAAKMGSIPEEARNWLDAFRERRSSSSGATGDYLIRERAIN |
| | | GWDKVVQAWETLGPNSTRDQRIAAARDVQANLDEDEKFGDIQLFA |
| | | GFGDEHVDDPERCLADDRATCVWRNSSGRADGRILKDYVAATVAEH |
| | | NQRRFKVPAYRHPDPLRHPVFVDYGKSRWSINYSALTAAQQRRKTTO |
| | | KLAQAKTDNTRAKLQQQLASTADLRSVTLGVWDGNRIVKISQRWRS |
| | | KRFWRDLDLDHFGSHPSAAVSRADRLGRVAARQDPGAAVYVAKVFE |
| | | QQDWNGRLQVPRRELNRLADVVYGKGADPDFGKLERLDPRARRLW |
| | | ERLSWFLTTSATVQPQGPWLDYVAAGLPSGIQYTKSRAGYYLNYDAN |
| | | HGRKGRARLCLARLPGLRVLSLDLGHRYAAACAVWQTLTIEQMTNEC |
| | | RQAAHPAPSNDDLFIHLRHPTHKPQKSGRKKGRPVTKTTIYRRIGPDK |
| | | LPDGTDHPAPWARLERQFLIKLQGEDRPARYASQKEIDEVNQFRNFV |
| | | GLEPIVDRPRVDDLHSDAVRVARLGLRRLADAARIAFAMTAAKKPISG |
| | | GHEVELTTAQRIEFLQDALLLWQSLAASRRYRDDWAEKLWQSWVVE |
| | | KLGGPQPAEIADDLPRSQRAASLKTARQSLRKVAEKLSDGQSPSAAEL |
| | | HRLWAERWQQRQTEWRRHLRWLRRLILPRRKDHQQEDRPLORVG |
| | | GLSVKRIQTIRQLYQVLKAFRMRPEPSDLRKNIPAPGDRSLASFGRRIL |
| | | NHLERLREQRIKQLASRVVEAALGAGRISKPPGRDRRRPQQPVDRPC |
| | | HAVVIENLQHYKPEDSRLRRENRQLMDWQARNLRKYIVEGCELHGLL |
| | | FVEVSPAYTSRQDSRTGAPGLRCEDVSRTALQEAARRMHASHSRPSN |
| | | SSPGGSQTQFEREVCRWINEFKRVEGSSSSLSARQAVLKAFLHHQASI |
| | | PTSLSTILLPRRGGELFVSADPDSPLACGLQADLNAAANIGLKALTDPD |
| | | WMGAWWFVLVDRASGQPVEEQVQGCPIWLSCGPLSNSNPATIDPS |
| | | DSPTAARRSNGTGAKGRARANEYWWSSLSATTLPDHKAWQPTQDY |
| | | WRDIEQRVVKRLLRLLDGSEWSED |
| 35 | cas12b | MNRIYQGRVSKIEIKDSEGNFRNVPVGSPDTCPLWRHHRIFQDAVNY |
| | | YLVALGALAGTGSENAFVGLGSKDRVIHDLYSRLFDSWERFPRDMHG |
| | | ASSLRDSLRRTLPGLSERASLQDAFDAILSGNEANARERVLSLLSLIQDL |
| | | GGDIQKGSKRYFPFFCEPATKATFPRARVGLLKVEGKDFVPRLLWSSD |
| | | LEIAPDQVVEQLKFEYFANPNESVQPIEGNEARVRLIEALDNPQLGIEL |
| | | PIEILSDLRKRVHLIETDIRIPRYFFGGAGAELRKFRLDLFLIAAYVTPDPSI |
| | | LRALRNSFKEPSASKSSKKKDETEEVENLLRSLGDDPLILARGERGFVFP |
| | | SFTSLPTWVGANAQKPIWRDFDIAAFAEALKSLNQFTAKTEEREEKLK |
| | | KAEETLHYMLGISDAIPRSSDSETEEQAPSRPGKDPRWPLVAQLEKEL |
| | | GENLSEGTWQLSRSAMRGLRDIIGLWRKHPGASVVTLQKDVKTYQA |
| | | DEKHKREIGSVQLFLLLCEERYHALWQTETDDERGDESEENDDPARILS |
| | | DAIEVHQIRREVERFREPIRLTPAEPVFSRRLFMFSDLTDKLAKVKFGET |
| | | TEENSEVKSQFVEAAIALKEGENLKEARVRITFSAPRLHRDELLGGAESR |
| | | WLQPITAALGFSNPAPSVKFDSAVALMPDHMDDGRIRHLLNFPVNF |
| | | DSAWLHQSIGKADLWKSQFNGTKDKNLHLHWAGTARDTTRKNTW |
| | | WENRTIIENGFTVLSNDLGQRSAGAWALLKVTCSRPDTKHPVRSIGH |
| | | DGTREWFATVLATGIHRLPGEDQRILKNGKWATEQSGKKGRNATFSE |
| | | YEAACVLAKNLGCESVENWLGMSGEKSYPALNDQLVKIANRRITRLGT |
| | | YHRWSCFSPEKFEDPARRANVIGGQLAELSAYQDENVTVSADILKSGD |
| | | FEGFRHRAGAAFEALRTELEVHLVNLANLTAPLRQKVWSWQKRPDSS |
| | | GYGDLLMVDLDDCHPKIRGQRGLSMARLEQLEGLRRLFLRYNRSLDR |
| | | SPGIPAKFGREDVGRTSGEPCQALLVKIDRMKEQRVNQTAHLILAQAL |
| | | GVRLCPHRIEENERKSRDLHGEYEKIPGREPVDFIVIEDLSRYLSSQGRA |
| | | PSENSRLMKWAHRAVRDKLKMLAEEPFGIPVVETVPAYSSRFHALNG |
| | | QAGSRLHELHELEAYQQQSLINLAAKTDFQNRDRSKAAGELFEQFQA |
| | | LAKLNERRRAEGKKVPRTLYYPKSGGPLFLASRDGDTIHADVNAAINL |
| | | GLRAIAAPACIDIHRRLRATKEKEVYRPRVGNAREKSAFSKDDIIQPSGA |
| | | PSKKFASSSSPNFFYEPEDLKQANGEPLFDRAMFGEYSLVSGVSLWSM |
| | | VNNAIYIRCVELNRTRLHGKDPDDQIPM |
| 36 | cas12b | MSITRSIKVKLIVPRDASLEARQLREGLWATHLFVNDGCHYYERLLLEF |
| | | RQRDVCVGKDDAGKDVIVPAAEWADRLRARLGRNGMVPSHIEAALP |
| | | IFRELYENMVPSALKAKSGTGQAGRSWHSKLVSPTSRGGEASAARIDV |
| | | LRPLLPVSGDDPAFEPAARALIEEAGDELLTSTGRCPAWVTAYRKGPE |
| | | GSAWVEKLRIQLREAVEAGDFDPPSDPQILAAGAVPAAPPLGAGIDAL |
| | | RPLLPLLGGDPAFEPAARALVEDIGDELFTSTGRPPTWVTAHPTWVRA |
| | | HRKDAECLEAADDFKWVERLRQRLRDDAKAGKFEQPLHERLGALGAL |
| | | PVAKPIGAGRVVSRADLTVFERGAMELAIEHLIGWESAGHRARAQYV |
| | | ERKKRHDDLLQWIEAEAPDALLAVRAYEAARTIHLATLGELGAAPQYT |
| | | LRLREIRPWRKLREWLLQNPDATIDERRRRLATMQTNDPRGYGGEAL |
| | | AWLAAPERRALVEHPAGDVVTRIAVLNIRKSILDRSRLFPTCTLADPVE |
| | | HPRFAKFGKPGDKNSAGYALAVDGVRREAIIKILVPRQDGLLVPTDLR |
| | | VPFAPSGQMRDLRASGLDISYERQDGRGRQAAKLQGGNLMFDRTHF |
| | | ARCGAPGPEALGSVWIKVALDLSSPAASLAMKTATPVRTYLSTAVRGR |
| | | PESTKYEKAAPPEGFRVLSVHMGLRTAATASMLRFGAPEEGGHEVPV |
| | | SGLAGETLVAFHERTVTMKLPGEDPDTRTEANRGVAKRELRGLGRGI |
| | | GCLKAIRRASASATPEDRAEALVIIETHVGQGDRHGWAPAEAVGRLD |
| | | PHGDPDDWKTACAALYAAVEADLGVAISSWRKAARAGGATGMLGG |
| | | KSLWAVDHLERSFRFLRSWDLRARPHDGDPRRPRPGYASKLLHHIDG |
| | | VKDDRVKTTADRIVQAACGRAWIGGPTVKRGTQDVRLPGRWEQRG |
| | | PRADLILLPDLTHFRFRSDRPRAENSRLMRWAHRQLAIYVRMQAEVE |
| | | GILVADTGAAFTTRFDAWTGAPGVRCEPVTADHLRGIAKREDYWLAR |
| | | LLREGALKHLRIDPASLRVDDLVPMDHGKILVALDGVDLPGLRILDTDV |
| | | NASQGLGRRYIEGHGLAYRLPGARVPRGEGEREAAVVHIKGKRLASA |
| | | MGGTVVVLRASEGPGDITWTAEVYDRPQGARKALGLSLAAFNSIATA |
| | | AVDDEGPAPENDDEALEEEAEEALGIATGERIVFFRDPSGAVAGGGW |
| | | LEASAFWGIANRMVTDRLRELGRLG |
| 37 | cas12b | MSLNRIYQGRVAAVETGTALAKGNVEWMPAAGGDEVLWQHHELF |
| | | QAAINYYLVALLALADKNNPVLGPLISQMDNPQSPYHVWGSFRRQG |
| | | RQRTGLSQAVAPYITPGNNAPTLDEVFRSILAGNPTDRATLDAALMQL |
| | | LKACDGAGAIQQEGRSYWPKFCDPDSTANFAGDPAMLRREQHRLLL |
| | | PQVLHDPAITHDSPALGSFDTYSIATPDTRTPQLTGPKARARLEQAITL |
| | | WRVRLPESAADFDRLASSLKKIPDDDSRLNLQGYVGSSAKGEVQARLF |
| | | ALLLFRHLERSSFTLGLLRSATPPPKNAETPPPAGVPLPAASAADPVRIA |
| | | RGKRSFVFRAFTSLPCWHGGDNIHPTWKSFDIAAFKYALTVINQIEEKT |
| | | KERQKECAELETDFDYMHGRLAKIPVKYTTGEAEPPPILANDLRIPLLRE |
| | | LLQNIKVDTALTDGEAVSYGLQRRTIRGFRELRRIWRGHAPAGTVFSSE |
| | | LKEKLAGELRQFQTDNSTTIGSVQLFNELIQNPKYWPIWQAPDVETAR |
| | | QWADAGFADDPLAALVQEAELQEDIDALKAPVKLTPADPEYSRRQYD |
| | | FNAVSKFGAGSRSANRHEPGQTERGHNTFTTEIAARNAADGNRWRA |
| | | THVRIHYSAPRLLRDGLRRPDTDGNEALEAVPWLQPMMEALAPLPTL |
| | | PQDLTGMPVFLMPDVTLSGERRILLNLPVTLEPAALVEQLGNAGRWQ |
| | | NQFFGSREDPFALRWPADGAVKTAKGKTHIPWHQDRDHFTVLGVDL |
| | | GTRDAGALALLNVTAQKPAKPVHRIIGEADGRTWYASLADARMIRLP |
| | | GEDARLFVRGKLVQEPYGERGRNASLLEWEDARNIILRLGQNPDELLG |
| | | ADPRRHSYPEINDKLLVALRRAQARLARLQNRSWRLRDLAESDKALDE |
| | | IHAERAGEKPSPLPPLARDDAIKSTDEALLSQRDIIRRSFVQIANLILPLR |
| | | GRRWEWRPHVEVPDCHILAQSDPGTDDTKRLVAGQRGISHERIEQIE |
| | | ELRRRCQSLNRALRHKPGERPVLGRPAKGEEIADPCPALLEKINRLRDQ |
| | | RVDQTAHAILAAALGVRLRAPSKDRAERRHRDIHGEYERFRAPADFVV |
| | | IENLSRYLSSQDRARSENTRLMQWCHRQIVQKLRQLCETYGIPVLAVP |
| | | AAYSSRFSSRDGSAGFRAVHLTPDHRHRMPWSRILARLKAHEEDGKR |
| | | LEKTVLDEARAVRGLFDRLDRFNAGHVPGKPWRTLLAPLPGGPVFVP |
| | | LGDATPMQADLNAAINIALRGIAAPDRHDIHHRLRAENKKRILSLRLGT |
| | | QREKARWPGGAPAVTLSTPNNGASPEDSDALPERVSNLFVDIAGVAN |
| | | FERVTIEGVSQKFATGRGLWASVKQRAWNRVARLNETVTDNNRNEE |
| | | EDDIPM |
| 38 | cas12b | MPTRTINLKLQISPKTDEGRKIRSALWTTHSEINKAVAEIEKLLLLCRGE |
| | | KYYTTNSKDEEVEVPEPQVKTDALEMARAVQAKNGKAGTGSDEEVLS |
| | | ALRMLYEATVPSSVLDDKGKPLSGDAQSIGGSYAGPICDPETCRIKDV |
| | | DRLFESGPFAETASKKFTQLPAWFNEVTKKNFNKDEPEKFVKVGKDK |
| | | DEKFYEIDLRQADAWYESPEVKDIVSKNKAFNKDKWWKNKRDGVDT |
| | | WAAEFVKKQFDLRKDVRVSIREELWDRLGLLPLGSLYFKKPVGNKWN |
| | | RMAFRLAIAHLLSWESWNHQTLAEYTKYTKYKDGLIELAGASRSLEVR |
| | | FEPLRQYQKERHEELSRTSFVDDDRPFTIGARMIRAWGRVREAWRNK |
| | | GDGIDERRQILADLQ.TELKGKFGDPHLFLWLAEAGRESLWRDEDVLTT |
| | | FVEINIAQRDLERHRPYSLMTFADARLHPRWAMYEALGGTNLRNYEL |
| | | TPEGKVKIPLLICEKDKLSEKTFTIPLAPSGQLKSLEIKSLPKKKVKISYASA |
| | | HQFYAGIPGGSEILFDRLFMENRASSALANGSCGPAWLKLTVDVESKA |
| | | PPEWLDKKGRVQTPPTVHHFKTGLANKSKHTDKLEPSLRVLSVDLGLR |
| | | TFASCSVFELVDEKPAKGLFFETDHPHLWAKHERSFKLTLPGEEAGDD |
| | | PKVAQARREAMDEVYSLRRDMYRLKDILRLKIISAPNERREKLESKIAE |
| | | MREKQDARAVVTSNFFERLSEKCDLNPPMWEHSCNEIHRDAEKAFS |
| | | ARIGEWRKRTRKRPGSWEEWRETRSYHGGKSYWMIEYLEAVRKLLIG |
| | | WSTHGRDYGEINRQNKKRYGTVASKLLKHINKLKEDRTKAGTDLIIQA |
| | | ARGYIPLPGKGWMEKYRPCRVILFEDLARYRFKVDRPRRENSQLMKW |
| | | GHREIINEATLQGEIYGMVVETAGAGFSSRFHAKTGAPGVRCRYLKED |
| | | DFENGAPKEFLVRQMKNLMKGDRLEPGLLVPWDGGELFATVDNGK |
| | | PIVIHADINAAQNLQRRFWTRFADAYRVNAVEENDNWVVTDTGVRV |
| | | LGALEMAVHGEADRKPRTGFTLHGTLQSGAELKAEGKKTDIKDVEED |
| | | KDDSISSEIIELQDEKERKGRETFFRDPSGGILDPGKWYGSKRFWGRAK |
| | | GAVTEALLDNQGANNALEEKPGNDELPF |
| 39 | cas12b | MATRSFILKIEPNEEVKKGLWKTHEVLNHGIAYYMNILKLIRQEAIYEH |
| | | HEQDPKNPKKVSKAEIQAELWDFVLKMQKCNSFTHEVDKDEVFNILR |
| | | ELYEELVPSSVEKKGEANQLSNKFLYPLVDPNSQSGKGTASSGRKPRW |
| | | YNLKIAGDPSWEEEKKKWEEDKKKDPLAKILGKLAEYGLIPLFIPYTDSN |
| | | EPIVKEIKWMEKSRNQSVRRLDKDMFIQALERFLSWESWNLKVKEEY |
| | | EKVEKEYKTLEERIKEDIQALKALEQYEKERQEQLLRDTLNTNEYRLSKR |
| | | GLRGWREIIQKWLKMDENEPSEKYLEVFKDYQRKHPREAGDYSVYEF |
| | | LSKKENHFIWRNHPEYPYLYATFCEIDKKKKDAKQQATFTLADPINHPL |
| | | WVRFEERSGSNLNKYRILTEQLHTEKLKKKLTVQLDRLIYPTESGGWEE |
| | | KGKVDIVLLPSRQFYNQIFLDIEEKGKHAFTYKDESIKFPLKGTLGGARV |
| | | QFDRDHLRRYPHKVESGNVGRIYFNMTVNIEPTESPVSKSLKIHRDDF |
| | | PKVVNFKPKELTEWIKDSKGKKLKSGIESLEIGLRVMSIDLGQRQAAAA |
| | | SIFEVVDQKPDIEGKLFFPIKGTELYAVHRASFNIKLPGETLVKSREVLRK |
| | | AREDNLKLMNQKLNFLRNVLHFQQFEDITEREKRVTKWISRQENSDV |
| | | PLVYQDELIQIRELMYKPYKDWVAFLKQLHKRLEVEIGKEVKHWRKSL |
| | | SDGRKGLYGISLKNIDEIDRTRKFLLRWSLRPTEPGEVRRLEPGQRFAID |
| | | QLNHLNALKEDRLKKMANTIIMHALGYCYDVRKKKWQAKNPACQIIL |
| | | FEDLSNYNPYEERSRFENSKLMKWSRREIPRQVALQGEIYGLQVGEVG |
| | | AQFSSRFHAKTGSPGIRCSVVTKEKLQDNRFFKNLQREGRLTLDKIAVL |
| | | KEGDLYPDKGGEKFISLSKDRKCVTTHADINAAQNLQKRFWTRTHGFY |
| | | KVYCKAYQVDGQTVYIPESKDQKQKIIEEFGEGYFILKDGVYEWVNAG |
| | | KLKIKKGSSKQSSSELVDSDILKDSFDLASELKGEKLMLYRDPSGNVFPS |
| | | DKWMAAGVFFGKLERILISKLTNQYSISTIEDDSSKQSM |
| 40 | cas12b | MYRGFCTVTATSGGWQSTTFLAGAQMADTTTRAYTLKLQGDRLAL |
| | | WRNHVIFNNGVKAWGEWLLCLRGGLPASLADHRDSLDVSKGEISRTF |
| | | KERTAAITPATIRQELKFKAATEKKVREEVASRRKKVTETAVAKELLAAR |
| | | RSELRRILALSWLCPETPVQLVPQAAIVAAADDSDREQKVLDGFRQILK |
| | | RKGVSDVAGWVQDCDATLRATIRSDAVWVDRTACFCSMPRAVRPS |
| | | EVDAAKHLFRLFGSMSDYFATASASSGPAEPKDFANTCRDWVSSFW |
| | | GGGEKSNKASILAALSAIAQIKPTRVVGKRGPAALAVIAGVLEQKPVDD |
| | | SVEALARAIGWLSGRPSAARLAINAIAASPRVSQKLWDRLVLACEKDC |
| | | GRQKSKLAFEGSASTIASALEPRLAGLTGMPYASTGRELIGEYATMLAF |
| | | AMRRVSQIHTKAKQAEAERRSFAPEQARLALVPSAARKWLEDYVEAR |
| | | TAASGAVDGYQLRKRALGGWADVVAAWSRCETSEDRIAAVRELQAD |
| | | WEKAGDVQLFEALAADDAICVWQSANGKTAASILTDYVRAAVADQN |
| | | ATRFKVPAYRHPDPLRSPTFVGFGNSQWSIAYSAQGEARERRKLLDRA |
| | | SGSAKDAERAREGLAREAVLQNVSLDLWAGDKMVPTQFRWQSRRLL |
| | | SDLALHSVPAMKGAKVTRATRFGRARIAAGPVLLDGIADDTPWNGRL |
| | | QAPRRQLEDLARILDAKGLPFDDESKWPPKVRSRLKHLGWFLTHSAKL |
| | | TPSGPWLDYVAGGLANGWKWAEGREGACLFREDNKDRKGRAKLILS |
| | | RLPGLRLLSVDLGLRTSAAAAVWQVVSKRQLTAAKDGAKSVSDTDLF |
| | | CLVRTGDRTQVYRRIGLSAWARLERQFLIRLDGEKAAARPATTNEWES |
| | | LQSFRAWLGCGIERRPEKLPPVDSLQQSAERLCRLGLRRLSDLARVAYL |
| | | LTAKERPIMGGRTAPLDEEGTVQAAQDALSILHALGSSEDFSDARLQG |
| | | IWRTAIGDTPPLAARLTKKQRQELREALRPAAEKLRGKAALGKELADL |
| | | WKERSAAWAKHLRWLRDWVIPRFDKRKNGERVRSARGVGGLSLDRI |
| | | ATIRGVYQIMRAYASRAEPTNLRAGVERLEKAAAKKLRPEFGRRMLAK |
| | | MERLRENRVKQIASRIVEAALGVGSEDRLHWERGRRRPTAAISDPRFA |
| | | PCHAVVIENLENYRPDEKRTRRENRGLMSWAARAVGKYLAEGCQLH |
| | | GLYLRQVSPAYTSRQDSRTGCPGLRCNDVRAQELLNPEGWIGRLVAR |
| | | AAEAVKEGKATPRQRLLVTLAESARAGIAESAAVRIIAPGGQLFIAADP |
| | | QSPASNGIHADMNAAANIGLVALLDPDWPAAWWRLPCKAATGYVD |
| | | ESKVGGSEAVPLGRAILEVGAEAGKVYVNAWSDPQDSAVSRREWTD |
| | | TKRYWRDVEERVVEILLASNRGGRRGKPGAVPF |
| 41 | cas12b | MATKSFEAKIVCKPDEKYTAEQKKQFLWFTHQVFNDGVRKVIPYVFK |
| | | MKRGELGPEFQAIYYAITSSQDAIGKLEAVINPDWTSGKIGKSDPNKW |
| | | KELLKYQELEKGFRQRLKEEGIKSTKKFRKELEDEKKKLAKEIGQKDIWA |
| | | DAAAILRNKNLLLFNRDELLPNLPSEFRRKIYEMTIQLIHGHQELVANW |
| | | EDEHAEWLIEKDKWEEEHPEYMNVRPIFEKFEKEQGKVKGSRIRWLA |
| | | YLDFLSSKPELANWRGKAKETIPLTKEERAGFRKPGQHFAAFFNKNPEL |
| | | QELDRLHKEYQEKFARTQSKRTPHPDGFKHRPTFTLPDAMRHPVWYS |
| | | FKGATDPTKGSTYRNLDLENCTLDLKVLTAMEGEGRNPGGMIQYAFE |
| | | PDERIKGFRYVGTTEKGKRAKGYIYYDPILEKERPAKIQGIKLVFRPPRP |
| | | DGTAYLIFSCQIEDEKPKIKIWKDKEEESPGEITKRKKTEVYPPELITLAID |
| | | FGQRHLGAITICKNNNGRPEPIRFIPAYPKRRKDRESKPVSAWLAKIPG |
| | | LTFNAVGMHEKEISAGMSRRFQDPKSIRQAGEKEGRKSKGQHIPETET |
| | | PWAHLREHIANMKEDHYKKAANLIIRTALQNGAQVILIENLRNYRPML |
| | | ERTNLENRRRMQWAVRQTAKFLEDTARPLGLIVRQVSSAYTSRFCSSC |
| | | GHPGARVSLPGQKNWEKFYAEKYGKERKMIAVAGGQFFCCPACKKII |
| | | NADINASLNMHKVFYQNFIWPGKIDKKDTKNFIWQGKNYNWDQIA |
| | | DDVQSFLDQKAGIKKEDDIPY |
| 42 | cas12b | MAYGSEAPDERNRKVTERFRIILSRMGINQQQEQEWLDACRPALTAS |
| | | IREDAVWIDRSACFAEAQQHYPGLSSEWARETLFDFLGGENDYFALP |
| | | DPEAAPSSEAKDFVQKAGGWLSRHWGAGKKSDSTAISTNLNRLAGV |
| | | ESKAIVGRCGCDALAVLLTTLGGWPAKNADSGTLYHQLKQAVGWKG |
| | | RPSRAAKALEKVRDAPEVTDALWRQTADTLRQEAVAQSSRAAGGSG |
| | | VPAWMPAWREDMEARLGMPYRGARDYIWEHSVMLDHALRRVSSA |
| | | HTWIKRAEAKRRRFQQDADKIGSIPAKAREWLDAFRERRFSASGALR |
| | | GYLIRERAIDGWDRVVQAWASLGPNCTREQRIAAARDVQANLDEDE |
| | | KFGDIQLFAGVGDEDEGDPQPCLADDDAICVWRDLNGRADSNILKDY |
| | | VAATVAKHDQQRFKVPAYRHPDPLRHPVYVDYGNSRWSIEYSALKAA |
| | | HQRRKTTEKLVQAKTDRARAKFQQKPADTPDLRGVTLGVWTGSSIEK |
| | | VSLHWHGKRFWKDLDLDHFGRDPSATVSRADRLGRVAASQHPEAA |
| | | VHVAKVFEQQDWNGRLQVPRHELQRLADLVYGKGGDPDFAKLGSL |
| | | DERRTRRQWEHLSWFLTTSTTIOPRGPWLDYVAQGLPQGIQYKKGR |
| | | NGYYLEYAANQGRKRRARLCLARLPGLRVLSLDLGDRYAAACAVWET |
| | | LTREQITQECHQAGHPGPSQDDLFIHLRHRTGKPQKSGRNKGKPVTK |
| | | TTIYRRIGPDLLPDGTPHPAPWARLQRQFLIRLQGEDRPARFASQHEID |
| | | GSNRFREFLGLPPLADRPRVDDLHRDMVRLARLGLRRLADAARIAFA |
| | | MTATKKPISGGREETLATEQRIEFLQDALVRWQALAASSRYRDDWAR |
| | | QAWQEWIVEKLGGPQPAEIADELPRSQQATRVETARRSLREVAAKLS |
| | | NPQSSSATELHGLWAARWQERQTKWRQYLRWLRRLILPRRKDYQQ |
| | | ANRQVHRVGGLSVKRLQTIRQLYQVLKAFRMRPEPSDLRKNIPAPGD |
| | | PSLASFGRRILHHRERLRQQRIKQLASRLVEAALGAGRISKRLGRDRRR |
| | | PRQSVDAPCHAVVIENLERYKPEDSRLRRENRQLMNWQARNLRKYIV |
| | | EGCELHGLLFVEVWPAYTSRQDTRTGAPGVRCEDVPRSVLEEATRRIR |
| | | ALGSAPSGSSRGRSETRFEREVCRWIHEFNRVVGSSSGLSPRQSVLKAF |
| | | LDHQAAIPTWRSTVRLPRRGGELFVSADANSPLANGLQADLNAAANI |
| | | GLKALTDPDWMGAWWFVLVKRDSGQPVPQQVQGSPIWESCTRLSS |
| | | PATVDSSDSPAGARRSKGRGARGRARATEYRWSPLSAMTMPDNKT |
| | | WWPTRDYWPEIERQIADRLLREQIDPENRF |
| 43 | cas12c | MKKTSPLKRSALRTARRQIARGCLPIGNRDISTTRTRVLPLADSVADAV |
| | | WNQARTAALTLRGFGSGSLFDLLLDLHASGLRLFSSNGEREGFLLKQK |
| | | FDAGKFDRAAAKDVGEDMPKFTAANLRAALVAIPRGGGPDTDAKAL |
| | | ATRLARAVGVKATKLDKPPKLLKDMAKELAMAFPTWKELSTANGEV |
| | | GAVIDDVARMYGLRWPSLRRGWAFRLPEVTRELGSPTLAFDPDAPVI |
| | | DETSATARFAAIVARYLPECGGLTDSAAAKGVQARITTTNANGLSWLF |
| | | GVGLRGMRDLPVDTVADTLAIDVTRGRDALRALVNDIKALPRLGEFG |
| | | DRVYVESRATLQGAVDSLIANYVGRLADLVASADALEHDQPRPPVLD |
| | | DADWKPAIFDGMGFTPWEVEDMLDARPVEVARLRLALGVLAGTTPA |
| | | VAGDFARALADVEAFGAWAARTEAVAALINARVKVLKAPESLRLRGV |
| | | LGGGRWKAVVSIHPDEGEPAQVIPQLDTQLQALLDDGQRAFDVLVA |
| | | DYTPTFAAALEHARSDMRASLADKGREAPSAESIDLLARRKLLDMVAR |
| | | VTRRGSPSLGHAFLAACAVQGLTRPGTATERSLRGHILSGEQALFVHP |
| | | YARARSIVRLEHAGLLRLDLDALLTAMERDAEQRADVREQIVLRFTRQ |
| | | SLLLGGLPGRIRLAKVPWTQEAAAASGVRGAPWLKLHPDDAGTVARS |
| | | EVIKAFTARFHLSANGLLYRLNRMRFLERYDIRCFIGDTLLFAPKAGAW |
| | | TPPEQYRHGKYAHWLSHPDLPRTEGGAVDVVPAARWLTEASRRADE |
| | | DGRASAVALLAQFPHEWVAACEFEGAPVYEGVFPCEGKIGGWMKRR |
| | | GYRLAPPRHFAGELLAAFKDASVSPHGLTFEREMLREGTTVRELSRRV |
| | | VAAYPIAVPTHPDAERPWSPLHLMGLDLGEAGLGVCLRHIGTGAETTL |
| | | LLPVRKTRLLAHREEHYRRKVQPRQAFRKGYGDAMELAVKAAIGEVC |
| | | GIIDNLIVRYRAVPVFESAVAQARGSNKMIQRVFAGVVQHYTFVANN |
| | | GAAQTVRQSHWFGAGRWSYTYGADLLPAARQMTEKQLLKAKAEAV |
| | | FRPAMGFPGVMASGYRTSLVCACCGEDVLDAVDAAAEGGQVALTT |
| | | DAEGSGVLDLGGRSLRIKLEAPSPNPIVQKAARRKRRRTPWEALADRT |
| | | WTLTHKTDRADLVATLRRGLRRPPASVQGHATSGWEFHCAACGHIA |
| | | QADVNAATNLVRRYDDRVRKMEQARAHWDDPSVRAKLASELAERA |
| | | AARS |
| 44 | cas12c | MLTTKFKLELPAGCPLREDAATFDECRKLYDVVEGCGNGTLTGFLFSVI |
| | | LSGFRIFPDGKTAEIFANRSVYDEDEFRSALVEAVGAPLPRFTVKALIKR |
| | | LQMEVRARGNKDNRFVAEVMMKEYRQTLCGKTLPKGVDESYVDRLF |
| | | EEMARELTSRYRSWNELKGDLLGACKAVDAALRGFGDFPSLATMVTR |
| | | AAARRLPKDSTIVFDPQSPCIDVQTIGVDAMPYAAVSTILSYPESVGEK |
| | | RRDFVQNHLTTPSAAGLSWLFNRGLELFSEESVEELCRLFHVPEDQRT |
| | | RIVQIQNAARATPRQSFFLKKGGAPLGYHDFRSAFAGRINSWTANYL |
| | | NRLEELQGLLHDLTDELRLPDLVRNGEDFLATTDCRREEVEILCRSFSRE |
| | | RDRAQTAVEHLIGADPLQVVSDVAAIEEYSRIVNRLCAIKEQIVNSLRQ |
| | | AEDDKASRWTALWSEVKDEFQPWEKLIRLPKLNGMSGGVPPAQDEL |
| | | ETILARYSDVGRGASEHFDAVMEWAAKTGAEGDVLKKFAETEQQRA |
| | | DQRAPGKYDGRELALRLVLQRVARVVRDRSDACAENVRQWFLKENV |
| | | FAERKDFNKFFFNRLGNLYVSPFSNRRHAGYKLSDGLVERSGAVWREL |
| | | LALVKEMRGAYASFSEAGETFLRLESLLMGMRIGALTKNIPAEVAALRL |
| | | DDETALESVSEGLKLQLQQAEVPPSVLAKAFNVYVSLLSGCLIALRRERF |
| | | FLRTKFSFVGNTALVYVPKEKSWPMPSRYEASPSWTPIFENDVLVRLS |
| | | TGEVEVAETFRRAVALWGRTTDPVLKKALRELFHQLPHDWCCQVSVR |
| | | SSGDMTPAKRKEDDRDVLIVEKKGKYDSTIISKKIAATALVRLVGPSTH |
| | | KERLNRLLLDVGEVACDMTLLADQEILQKVEDDRVHLSPGKLQFSLSV |
| | | PISTPAEQCEDEVKSERKSTHFRRIVAIDQGERGFAFAVFRLEDAGKKG |
| | | AQPIAQGFVNIPSIRRLIARVHSYRKGKQSVQKFSQRFDSTMFTLRENV |
| | | AGDVCGAIAGLMSRYRAFPVLERQVSNLASGGKQLELVYKMVNARFL |
| | | DDRIPMHSLERTSWWCGTSDWVIPDLWVEVPESYAVKAKKDEILEKD |
| | | GKFYRTLRITPGAGVNAKWTSRICSQCGGNAMELIEKAREEKVKTVTL |
| | | DANGEVTLFGRTLRLYKRPSEERSREARRRNERAPWTEPRADVRLSLD |
| | | DFRRAVAENMRRQPKSLQSRDTSQSRYFCVFTDCRCHNKEQHADIN |
| | | AAVNIGRRFLESLLRE |
| 45 | cas12c | MRRQHHGGQNARDWRRKVAAAALRQKESVFTYKFGLSVNDGDFDF |
| | | DAAARTYDITEGIERGSLIGLVCAVHLSGFRLFSKVAETRQFLNRSRYPE |
| | | NEFAQALAAHTEIENPSVTVQSIESVFVTPPRKQDGVARLWSADELAK |
| | | RLFQTWNNRSPREGERNHPELLLAQGIARAVTKAFSGWKELADNAV |
| | | HALTCADNYLATLGNRFPKLSDLPPLTAGSTQTGTLAFDPESPFLNMT |
| | | GNEDIWLHQVVAVCAGRLKRYMPEIDPSSRKFASRLTDSIVSSQNNGL |
| | | SWLFGNGLRFLRQSSIAQIAETLSVSQNEHRRVEQLKEFADAIPVNPFF |
| | | ATDGYAEFRGSVGGKISSWVSNYWKRICELTVLHSQPPDITIPEGLLAS |
| | | ENATLFSGQHTAAAGLVALSARLPSQVRDAGKALFVLSGDGVPRADD |
| | | IATVEDVAGELAELTGQLAMLDNRIQQEIERAQDANDEGRVGSLASL |
| | | RPNPTKELKEPPKLNRISGGTADAAGELARLETSLNDLIRARREHFYRLA |
| | | EWTGNTASLDPLPALAERERKALTDRGMDPTLAEADEYALRRLLHRIA |
| | | GMARRLSPNEAKRVRETMTPLFLKKREANLYFHNRAGALYRHPFSNS |
| | | RHQPYSIDLNRARATDWLAWLEERAREMLGLLGSGAPANHEYLRDLL |
| | | SIETFVFTTRLSGLPAQVPGYLAKPKSDLTNIPPLLAAQLDVDEVSRDVA |
| | | LRAFNLFNSAINGLSFRAFRDSFIVRTKFLRLGHDELFYVPKARAWKPP |
| | | ADYRSAKGKISKGLALPAVKRNEAGSILPRETTQGLSRAKFPEGSHALLS |
| | | QAPHDWFVELDLRHDKMPQLAGLPVKMNADGLKGWRARRRPTFR |
| | | LAGPPSFKTWLDRALTSTAVKLGDYTLILDQSFKQSLRVEDGEVRLSAE |
| | | PAGIKAEIAVPVIDARPFPETEAEALFDNIIGIDLGERRIGYAVFSLPALLK |
| | | SGNPTRVKPTVVGSVAIPAFRRLMAAVRRHRGSRQPNQKVSQTYSTA |
| | | LQQFRENVVGDVCNRIDTLCERYRAFPVLESSVANFETGANQLKLIYG |
| | | TVLRRYTFSNVDAHKSARSAYWYSANRWQHPYLFVREWNKAQRTFT |
| | | GSAKPLAIYPGVTIHPAGTSQICHRCGRNALRALRNMPDRTIRVGKDG |
| | | LIVLADSTIRLLERADYSDRELKTFKRRKQRPPLNMPVPEGARPRDQLE |
| | | RVLRRNMRQQPQSEMSPDTTQARFTCVYTDCGFEGHADENAAVNI |
| | | GRRFLERIDIEASSRT |
| 46 | cas12c | MTHAKKIPFPVLKRSTLRKARQRIAAGSITAGERPFNSTVTRVVPVKDP |
| | | VSDQVWAVAREAAMTLRGFGQGSLFDMLIHLHADGFRLFPSGRERE |
| | | AFFLKDLFDPTEFDDGARRAFGDVMPGFTANSLREILGAPARKCGKVT |
| | | SVEILLPRLSKGLGVKKSAAPPEVLSSLAAALCEAFPTWSLLTAVDGGV |
| | | GKVIDDVLRTHGSRLPSLEKAWSTNLPEVPKGLGVPTLAFDDQAPAQS |
| | | EQTPTGRFAGVVARYLAETFASNPEATAGDASKAVQAKVTTPNGNAL |
| | | SWLFAVGRRAMCSTTLDELAIGLNITSPRGRHALSSLKERMMALPALS |
| | | VLGERAYPDSRATLQGTVDSLIANYVNRLFELSSSATSIAQTKLILPAAIQ |
| | | GDTAVFDGMPFSAEDVGALFEQLPSEIAKLEHAVKVLVGKERTSTLGY |
| | | QKAVDDVDEFGVWASSVDAVIGQINARLKTLERAQEPLGKLMGDGK |
| | | LKRLVNIHEPEGPAVEIIPVLDQELQDVLTSCRTAFADLEARYPMTVAK |
| | | AQRHAEAEVRNALELASRKEGGLSLASADVPALAKRKILEPIISIARRSS |
| | | PAMATAVLTECLRQKLIVKGTGSERSLRGYVLSGEQVIYAHPLSRRRSI |
| | | VRLDREGLQNFDALEFLDALQKDATQRTNVRESLIVEMARQSLLLSAL |
| | | PDRIEIGAISWQTPSQNQHAPWANLRPVNGTVGRSETIKSFTAVFHS |
| | | RISGLLYRLNRQKFMEKYDLRCFIGSTLLFSPKNADWAPPPQYRHGRF |
| | | SALLARSDFPWEGAEGTHANAVRLAKFLIDETRNATDLQQAIAAKALL |
| | | AQLPHDWVVCCDFDGAPSYEGAFVSAGEVSAWAKRSGYLLTPPRHF |
| | | AGAFLEGFKSTKISPHGLTFERMLERDGDSVIETGRRVTAAFPITQEVA |
| | | PAAQPWKPRHLAGLDLGEAGLGVCLKNLDNGHEQTLLLKTRKTRLLA |
| | | HSAEHYRRKDQPRQVFRKQYNQSSENAIKAAIGEVCGLIDNLIARYDA |
| | | VPVFESQAAAARGSNRMVARVYAGVLQRYTYVVGNGAADATRTSH |
| | | WLGANRWSYSFGADVIPKVRDLSPEVLRSIKKPENVFRDALGFPGVLA |
| | | NAWRTSMICSVCGTDPIGALEEAIAANQISFVTDNEGEGSLDLGDGRK |
| | | VTLRVEVPTSSALTKREASRRKRRAPWEAKVGTVWTLTRKSHRDDLLT |
| | | TIRRSLRRPSSTFQGSTTKQWEFHCPCCGQIQQADVNAASNLVRRYF |
| | | VRASDNARARQHWADDSKRLAFIASMGPDRSAREEKVS |
| 47 | cas12d | MRKKLFKGYILHNKRLVYTGKAAIRSIKYPLVAPNKTALNNLSEKIIYDYE |
| | | HLFGPLNVASYARNSNRYSLVDFWIDSLRAGVIWQSKSTSLIDLISKLE |
| | | GSKSPSEKIFEQIDFELKNKLDKEQFKDIILLNTGIRSSSNVRSLRGRFLKC |
| | | FKEEFRDTEEVIACVDKWSKDLIVEGKSILVSKQFLYWEEEFGIKIFPHFK |
| | | DNHDLPKLTFFVEPSLEFSPHLPLANCLERLKKFDISRESLLGLDNNFSA |
| | | FSNYFNELFNLLSRGEIKKIVTAVLAVSKSWENEPELEKRLHFLSEKAKLL |
| | | GYPKLTSSWADYRMIIGGKIKSWHSNYTEQLIKVREDLKKHQIALDKL |
| | | QEDLKKWDSSLREQIEAQREALLPLLDTMLKEKDFSDDLELYRFILSDF |
| | | KSLLNGSYQRYIQTEEERKEDRDVTKKYKDLYSNLRNIPRFFGESKKEQF |
| | | NKFINKSLPTIDVGLKILEDIRNALETVSVRKPPSITEEYVTKQLEKLSRKY |
| | | KINAFNSNRFKQITEQVLRKYNNGELPKISEVFYRYPRESHVAIRILPVKI |
| | | SNPRKDISYLLDKYQISPDWKNSNPGEVVDLIEIYKLTLGWLLSCNKDFS |
| | | MDFSSYDLKLFPEAASLIKNFGSCLSGYYLSKMIFNCITSEIKGMITLYTR |
| | | DKFVVRYVTQMIGSNQKFPLLCLVGEKQTKNFSRNWGVLIEEKGDLG |
| | | EEKNQEKCLIFKDKTDFAKAKEVEIFKNNIWRIRTSKYQIQFLNRLFKKT |
| | | KEWDLMNLVLSEPSLVLEEEWGVSWDKDKLLPLLKKEKSCEERLYYSL |
| | | PLNLVPATDYKEQSAEIEQRNTYLGLDVGEFGVAYAVVRIVRDRIELLS |
| | | WGFLKDPALRKIRERVQDMKKKQVMAVFSSSSTAVARVREMAIHSL |
| | | RNQIHSIALAYKAKIIYEISISNFETGGNRMAKIYRSIKVSDVYRESGADT |
| | | LVSEMIWGKKNKQMGNHISSYATSYTCCNCARTPFELVIDNDKEYEK |
| | | GGDEFIFNVGDEKKVRGFLQKSLLGKTIKGKEVLKSIKEYARPPIREVLLE |
| | | GEDVEQLLKRRGNSYIYRCPFCGYKTDADIQAALNIACRGYISDNAKD |
| | | AVKEGERKLDYILEVRKLWEKNGAVLRSAKFL |
| 48 | cas13a | MPIVKKFGRSQ.TSLSDRKIVLKMETAARNIPDFLLSDPEAVIGQWASA |
| | | MDKIAKKPKGKDKPSSYQRKFRERLGKAIWADLTGPEGPLRDVPAAEL |
| | | EDLRKRWDRRVHPYPDGTKDGPKPATPKGRLYTRFAGEVGYGKADA |
| | | VAIARDIRIHLLETEFKTGGGTRDAGRAVRRASSIEKNVLKKARVPQRP |
| | | KPPQEAAWSKEDEDRYFIPHDVARKIVLAAKAQEKEDHRVAWRTAA |
| | | AVLFEHFGRIFQQDGRALSFAEAEKQMPGLLALHRAVEGYYRQALKR |
| | | HRKDRREHEARPGREKGTGRRKVSAILPKDKTALLALIGHQHQNREIA |
| | | ALIRLGRILHYEAGRRGNSDMVANINRNWPADVSESHYWTSAGQIEI |
| | | KRNEAFVRIWRSALSHANRTLGDWLSPDEVANDITMSWESKHEKSG |
| | | KRKTGKLEENREEAEAHAPVIFGGSAERLGTGDDFQKTLEAICEVFSQL |
| | | RHSSFHFRGLDGFKDALTKTVKTCDPGAVARLQDLHAEDQANREARL |
| | | KEDLRGAHAELFLDEGRLAEIWALLHPKSTEKTLPPLPRYSRVVTRAEN |
| | | TCNGLKLPKSVNRESMKVPAIHCRYILTRLLYQSGFRTWIAEAPAAQLN |
| | | RWIETATERAQKATVGITKNEADRARMVGQIKVPEGQGIRRFLDDLA |
| | | GLTATEFRVQAGYESDREAARDQAAFLENLNCDVMALAFDKYLSDHK |
| | | LGWLAGIDAESRPSETPLSNVDELPSSGSLGTPERWEAALYAVCHLIPV |
| | | SEVGRLLHQLRRWSNGQKATPDGGRLERLFELYLDMHDAKFDGSTPL |
| | | RDHDDLAVIFETTGIRDRVLPSSLQHGEHERLPLRGLREMLRFGNLRVL |
| | | APIFATAKVDQAMIGELEGLEARIGDAPSQVDRAQALRTEMHAALCK |
| | | KRKLAHDDKKSVKDYLTSLQTVIRHRRLANHVRLTNHVRTNEILMSV |
| | | MGRLADFSGIWERDLYFVTNALLYQAGLTPCDVFSKEPPKENRRSPLQ |
| | | EFENGQIVFALRKMQAQCDTHAGLVDQIKGETARLFHIAEGAPGNDP |
| | | RIQNRNWFAHFNALKPKTGDRLDLTADMNRARDLMAYDRKLKNAV |
| | | VSAIVTLLERENIVIAWTMKDHQLTDAVLAAKSIEHLKQNKIRENLRDE |
| | | RSLGYVAALFGGRVAEEAPDIMHDRTVFHLVGALTEEMEPAE |
| 49 | cas13a | MRIVRPYGESRTDLGGERGQTRVLVDNTAARARHEIPDFAQSHDALV |
| | | IAQWISVLDRIATKPQGTQGATRAQHAFRDRLGRAAWAQMCAADRI |
| | | SAAAQADPYVAALWRFKTHPYGDAKYRPRKGKDGKPLGEPKPQGR |
| | | WYGRFAANAEPEQADVAAIAALMDHHLHVAELRIDPKRPEKRKGLIE |
| | | ARAKSIEGNVLVAEPRKRPVGSWSREAITRYFMRQDVAAEIFAAARD |
| | | REQGLNDVPRGPVRLALAAKILHGHWTRLFHAPGTRTAYSIREAEEKE |
| | | PELFALHMAVKDAYAKLLKRRTQPKTLKKGVKPPQQAPVTTVLPKNA |
| | | GELLRLVQHRSRNRDLSALIRRGKLIHYTAFDIAAAAAEAESKTPDVPD |
| | | ADRLAYVLTHWPDDLSASRYLTSDGQSAIKRSEAFVRVWRHTIAMAS |
| | | LTLRDWASMNNDLGDVLGSANKVDQAIGRANFDPAWHDKKVRLLF |
| | | GARAALFPSDDDGRKALLASVIRAGLALRNSSFHFTGRGGFLAALKKL |
| | | GSEEVMVPSILAAAHALWREDATARAGRLRAALTGAHAAHYFEEDQ |
| | | NASILTLLDEAPPKESLPIPRFRRVLGRAENTWKGKEALVLPPTANRRQ |
| | | LEDPARRCRYTILKALYERPFRSWLIARAPEEVNAWIDRAIERTTRAAK |
| | | DMNAKRGEDDKRSVIAAKAESLPRLSGERGIGDFFFDLSSATASEMRV |
| | | QRGYGHDGEAAKEQAGYIDDLLCDVVALAFDAWLRNPQANGRPLTF |
| | | ICDLKPETPLPAAPKCTLQEIGSAAEPVRPEDWQAALYLLLHLVPVGEA |
| | | GRLLHQLAKWTVTSRLADDLLNANVTDDPSKAERTADEEDLKRLVHT |
| | | LIQHLDMHDAKFEGGDALTGCEPFAALFASRPGFARIFPAEADERLDR |
| | | RVPKRGLREIMRFGHHGLVASFAEDTRITDKEVGDYLRLEIEERPDNVA |
| | | ALQARKEEAHERWVKAKEKRKTVDPKHLEDYVTALCGIARHRRLASR |
| | | VTLTDQVQVHRLLMTVLGRLVDFSGMFERDLYFAMLGLLDEKGARP |
| | | DEVFSGPIDEPKSRLALLANGRVLAALREQIPHSKDLAEELRKDLERLFG |
| | | MDCSGIRLLEADERGDTCLRDIRNDLSHFNLLHDDSFALDLTTLVNRTR |
| | | GLMSYDRKLKNAVSKSIKELLAREGLTLSWDMTDRHDLENARIGAKP |
| | | AVHLGGRKLAFRGGDRRPEPVRENLHSPTHLEAVARLFGGKVVEEDD |
| | | VTNLDLSSIDWAAEPHNSKETHRHRPAGPRKSPPKRRAYHAPR |
| 50 | cas13a | MRIIKPYGRTLVEHDGAGERKRVLTLRPDHDSKLDIEAFARDHDELVV |
| | | AQWVSTIDKIAAKPGPRKGATEEQRAFRDRIGKAAWALLVRNALLPG |
| | | LADADRADRLAKIWRRKIAPYGDLRPNERPASAKGRWYGAFAGEAD |
| | | VADVDAGEIAAKIHEHLYDAEYRISGDGRKPDGCIAARARSIAVNVLRP |
| | | ADSSACGQPEWSDRDLQAYRVADVAKQIWDAALSRENGRDGAGTK |
| | | RVTNSVAGGVLFEHWARIFPGPDGKALSIREAIEKEPGLFALHMAVKD |
| | | CYARILKHHKKKAPGRRERENGDVSPIRKVLPRDMDELFARIISGRGNR |
| | | DLNALVRLGKVIHYTASDPNADHPESITENWPGDLAGSHYWTSAGQ |
| | | AEIKRNEAFVRVWRHVVVLAARTLTDWGDPHGEIGSDILGKANDAT |
| | | GAKFDEAAFNRKCALLFGKRASHFTAAPDLAFKKAVLKTAIKGMAALR |
| | | HKSFHFAGRGGFVKALEGIGGLNEIDRFPDVTRALRTLLVEDIEDQSRQ |
| | | VRATMVGAHFGVYLSKGQVEAIYRAVTGAEPGSLPLPRFSRVLRRAKG |
| | | AWEAEDVLPPPVNRLDLEQRGRLCQYTGLKLLYERPFRRWLEGRSAA |
| | | KLNGFIYRAVTRASDAARTLNTKESDDWRDIIVARAEKLGKVPDGGDI |
| | | HGFFFELSAETASEMRVQQAYESDGERARQQAEYIEDLKCDVVGLAY |
| | | RSFLETEGFDFLRTLDPEAAIAEAHRFDPAELPDPAVDTDAEDWEAVL |
| | | YFLVHLVPVDEIGRLLHQMRKWDLLAHDRTAPVADGGQARLVDKVQ |
| | | RVFTLYLDLHDAKFEGGEALTGIEPFRKLFEESDGFDTIFPPQQGYEEDR |
| | | RVPLRGLREIMRFGDLPPLLSIYGRRPATKSNIERYRRAEVADAGGRSEI |
| | | ARLQARREELHAKWVEAKKEGLGPEDRRAYVEALAEIVRHRHLAAHV |
| | | TLTNHVRLHRLMMAVLGRLADFSGLWERDLYFATLALLHRAGKTPRE |
| | | VFENEGIDLLRNGQIVYALRKLNGSSNASALRSGLFPHFGSAFKRGDPI |
| | | GGIRNAFAHFNMLRAAQPPNLTECINRARQLMKHDRKLKNAVSKSVI |
| | | DLLAREGLNIAWAVHTRAGAHDLAEAVLSSRQAQHLGKLRLFPVSGD |
| | | GRDGKGFFIMEDLHGADFVEMAAELFGGRVSDRWRGKGCVSELRLD |
| | | SIDWSRQREQKKHGGGKKPTGRARKANRGHKNRHRRA |
| 51 | cas12f | MSARNIKVKIDTKGNPELRLGLWKTHQVTNEGVKYYTEWLIKLRQQD |
| | | IYRQSREDASPRVIISASDLKADLLCHARQLQKERLPRITGSDAEILGTLR |
| | | QVYELIVPSSVGKSGDSKTLARKFLSPLTDPGSAGGRDQSASGRKPTW |
| | | MKMKSEGNPRWEETFRKWKDRKDNDPTPLVLNQIADYGLLPLIPLFT |
| | | DVGENIFDPKSKSQFVRTWDRSMFQQAIERLMSWESWNQRVRRE |
| | | WEALNQKHSAFYREQFTADPDAALYRVAQSLEEEMRKEHQGFASDA |
| | | PEAFRIRRVALKGFDRLLERWQKTLGKNGQSATLLDDIRRVQSDLGDK |
| | | FGSAPLYQKLLDERWQRLWAVDPTFLQRYAAFNDLTQRLQRAKRVA |
| | | NLTLPDAVAHPIWSRYEGANASSGNRYHIHLPTKGQPGSVTFDRILW |
| | | PDGNGGWYERKRVTVFLRPSHQVDRIHEAPTDSVVDNFPLVVEDQS |
| | | ARTILRASWGGAKLEYDRNRLPRQLKKGVPDSIYLSLTLNLDTNKPSGL |
| | | FHTQQNGRVWIRKDVLMQYYNETPGDNVQFKPLYVMSVDLGIRSAA |
| | | AVSIFSVQLKAGIEEHRLTYPVADCPGLVAVHERSVLLTMPGERREQW |
| | | DRRYEQQRQGLRELRTDMRGMNDLLRGAYMDGDRREEFLARLSKLE |
| | | ETSPELWGPVYRSLNDSKVASATEWERLVVYCHRQVEQSLSSRIQNLR |
| | | SGRSAYRMSGGLSLDHVQDLERIRGIIASWTNHPRIPGSVVRWQQGR |
| | | SHTVALGRHILELKRDRVKKVANYLIMTTLGYAYDSKRARGEKWVRRY |
| | | PACHLMVFEDLTRYRFRTDRPRSENRQLMRWTHQELIAVTGIQAEPH |
| | | GISVGTMYAGFSSRFDAVTKAPGVRGATVRQILRTRGMVRLKEIAAD |
| | | VGIDINTLRPHDVLPTGDGEYLLSVVRHGESYRLKQVHADINAAHNLQ |
| | | RRLWTQDEVFRVSCRLALNSGRWAMPPPSYNKRYGKGFFEKGDNG |
| | | VYIWKTGGKIKISDTLEEDMDIPEDTAELLRGNSVTLFRDPSGTIAGGN |
| | | WLEAKEFWGRVNSLVNKGVRDKILGGIPVDNSSAHAE |
| 52 | cas12f | MPMIKITECVTWGTTCDGLWDARPHLEVRRSWSPPVQGGRTNRLD |
| | | APPASVTLNIHGRVEHPRDADALSVAPLRVRHMFERTTTKAAFLSPLD |
| | | LRPTQATDLERFAGTTRWAFNWANALLEAHHQAYEGRRQQAARHL |
| | | FGLGPEQLDELRVLANGTRDENGKKAKGDPVKRREYESIQKATKKAVS |
| | | EENKALGAEMKLWDEHRSLVVHKGRPLLTPGDEPALDAPPLAHRLYA |
| | | RRVELAGIQKTDPDYYAEQRKKEREAITPNVVAMKRDLMAKGAYFPS |
| | | EYDLQYIWRTVRDLPKEEGGSPWWPECPTILFYDGINRARTAWKNW |
| | | MDSASGARKGPPVGMPRFKSKYKAKDTFTITNPNRSVIKFETYRRIAIT |
| | | GIGSMRLHRGAKLLARRIAAGQAEITSATISRSGTAWYVSVLCTVHTTA |
| | | RTAPSKAQRSRGAVGVDWGVRALATTSKPIALTPGKPASRTVPAEKY |
| | | GAAMSQKIARAQRQLARMPKGSSRRRKAARHVADLQHLVAQRRAS |
| | | SVHQLSKALAQSFEIVAIEGLNVRGMTKSAKGTVENPGKNIRQKAGLN |
| | | RAILDATPGELKRQLEYKTKKYGSRLVELDTWYPSSKTCSRCGWVHPK |
| | | LKLSMRTFRCQQCGLVEDRDFNAAVNIERQGITHIVKENEGTDDREE |
| | | G |
| 53 | cas12f | MSTPMGWTAVNGGDATSPTTRVSSPPGEPRTGACPRAAAADATRA |
| | | ESSPRRTSSPARPGERHARARTSRYPIPNTYVVDRPSAEGDRHGQSSL |
| | | DCGPCPVRRSGALHQSSQAAHRRSMTGAKQKTPIRVVRFSIDHSALT |
| | | PAQVVAFARHAGAARQTWNWALGRWMDWRNNTKFYVDYKVFKA |
| | | AGMGPGLSTDDLIQVIERAVSIRQDDKWMDAAWDEARQIHGEWD |
| | | QFQKASTLQSLYLAGAQEPFDPSRDDGINPYHWWVTEGDKSGLPKA |
| | | ERHNVNSGATYTAPLRAFEEAVGRFYKLPGKKGTPKFKSKHDDEQGF |
| | | CIQRLTETGLSPWRAIEGGHRIKVPSIGSIRVVQSTKRLRQLIKRGGKTT |
| | | SARFTRRGGKWFVSVSVAFDLSAPRVQRPARLSRRQRAGGSTGVDLG |
| | | VNRLATLSSGDQFPNRRLLRKSMAEIKRLQRKFDRQHRAGSPECFNE |
| | | DGTHKKRCRWGREDGPAMSRSAQTTKRQLRRIHDLTARRRAGVLHE |
| | | ITKDLATRFELIGVEDLNVAGMTAKSKPKPDPDRPGHFLPNRRAAKAG |
| | | LNRAILDVGFYEFKRQLGYKTEWYGSTMQMVHRYAATSKTCSGCGW |
| | | VKPKLTLAERTFNCTQCGLAMDRDHNAAVNIRALALEGAAPMEREQ |
| | | PAPVGAAEKRHRDPVSHRRRPKSLAPCESTRPVRDLSPPATQEETA |
| 54 | cas12f | MAQAEAPRRLRAYKFALDPTEAQLREFEQHAGSARWAYNHANAILS |
| | | RYSDTLRNRWNAWIAQHHGLSREQLYALPDRERTAIQAAARAAVKA |
| | | ENAQLAAELRIIDDHRKRVTHKGKPSVEPGEQPAEDAPERAYQLWRE |
| | | RVELARLHAEDPQAYRAERKRILDEIRPLVNATKRKLIEQGAYRPTAM |
| | | DISTLWREIRDLPPDEGGSPWWPEVSIYAFTSGFAHAETAWKNYLESL |
| | | AGRRAGRPVGKPRFKKKRRSRRSFTLYGSVKLVTYRRIQVPSIGSVRLH |
| | | GSAKRLHRALERRGGIIKSITISQGGHRWYASVLVDELDITPGRETQRG |
| | | PSRRQRDRGAVGVDLGVHHLVALSDPNEKTLDNPRHLRKARKRLLKA |
| | | QRAMSRRRGPDKRTGQEPSRRWVKARNRVARLHHELAVRRAGHLH |
| | | EITKRLATSYELVAIEDLNVAGMTRSARGTIDQPGRGVRAKAGLNRSIL |
| | | DTSPAEFRRQLQYKASWYGATVAVIDRWAPTSRTCSSCGAVKAKLSL |
| | | AERTFFCEHCGMELDRDINAARNILAFAQSAYPGEGKALNACGGSVS |
| | | PGSQSVVQAGADEAGRPARKPRRSSRGSDPPATPTTRA |
| 55 | cas12a | MTSSSPTQRAYTLRLKSAAQGDKSWAEKLWDTHEIVNKGARAFGDW |
| | | LLTLRGGISHKLENLNDKETGEEGKKRRRILLALSWLSVESKDFAPEKYI |
| | | VEKDGEDKHRTKEALEAILKSRNLEDEEVESWVNDCKDSLTSSIRDDA |
| | | VWVNRSRAFDDAVRKIGDSLTREEIWDVLGRFFGKKEAYLAPRTIDEK |
| | | NGKTKKEEPKDLARKAGGWLSKRFGKGKGTDFSKLSKVYSEIVKWAEE |
| | | PRKSEPRTLANLASALKEDSLQGILNLIKNSGSKSGTRNFLEEIGEGEVS |
| | | KENLAILKAKAEGNRNYCKKEIGGKGRREWSDRILKSIEETLDGKFTYL |
| | | QEKGPARHWEFAVMLDHAARRISAGHTWIKLAEARRRNFEEDSQKI |
| | | NEVPENARQWLETYREDRSKSSGAIEGYLISKRAVTEWETVVKAWKN |
| | | CKTEEDRIAAAGALQDNLGIDQFGDINLFRALASEDVRCVWQVDGKP |
| | | DANILLNYVAATKAEFDKRRFKVPAYRHPDPLLHPVFCDYGNSRWEIR |
| | | FDVHEVNRTGKKAKQNKKTIETADVHGLKMDLWTGSKIENVSLRWQ |
| | | SKLLEKDLAVKQLDGKEDGKKEVSRASRLGRAAVGAGWETPVSASSV |
| | | FAQKHWNGRLQASRKELSRIARRVKTRGWDEKANSMKKNLKWFITF |
| | | SPKLKLQGPWISYVDNSEDKRPFTFTSKGEPILDEVFSIENKNRKGRAR |
| | | LILSRLPGLRVLSMDLGHRHAAACAVWETLSSRQLEDACAEGGYDKP |
| | | APDAMYHHIKSNRGKRVIYRRIGADELSDDSIHPTPWARLERQFLIKLQ |
| | | GEERKARMATADEIWEVHELERALGRKTPLVDRLTKSGWGSDSGTPR |
| | | QRQLLGELNQWGWEPDEAQENSEDDEITSRESLLVDKLMSRTVDTV |
| | | RKGLRRHGNRARIANFLVAREKTVPGGQMDTLNNEGRKEIIADALAF |
| | | WYELANGGEWKDTEALDWWKIHIEPELSVEELPDIAGTGIAPKERKR |
| | | KKKELKEKLKPVAERLLTSGAKKLSDQWCERWKQDDKEWQKTLRWL |
| | | RDWILPRGVRGKSELIRNVGGLSLDRLTTIQSLYQAQKAYFTRITPKGIQ |
| | | MDKDKPLTAVMNFGGHILNDLENMREQRVKQLASRIVEAALGVGRV |
| | | KIPKKSKDPKRHYERVDAPCHAVVIENLTNYRPEETRTRRENRQLMT |
| | | WCSGKVKKYLSESCSLHGLFLWEVPPSYTSRQDSRTGSPGIRCEEVSVE |
| | | KFFKTPFRQREVARAEEKDSKNKASAYEQYLIDLKERWKSRGEETALLR |
| | | IPRKGGEIFVSANSNSPASKGLQADLNAAANIGLKAITDPDWSGSWW |
| | | YVPCSSKDFVPIKDKIGGSRAFENITTPMPNPDDAKEATGKKRSGKKEII |
| | | NLWRNPACSPLERDEWERTAKYWNMVEYHVIKRLKRQMG |
| 56 | cas12a | MKNFQDFTNLYELSKTLRFELKPIWGTKKLIEEKNILKLDKKKRENYEKV |
| | | KPYFNKIHQEFINFALRNPNFDFSQFEEKYLNWLKDKKNKDLLKEKESI |
| | | DKIFLEKIWKLFENSVKDFLKENGFESIVKSEDQNLKFFRRKEIFEVLQEK |
| | | YGSELETQMVNKDWEIKSIFNGWEKWLWYFDKFFNTRDNFYKTDW |
| | | TSTAIATRIIKDNLKIFLENTIIFEKVKNKKIDFSEVEKNFSVSIDTFFEINNF |
| | | NNCFLQDWIDFYNKVIWGETLENWEKLKWLNEIINKYRQDTGEKIPY |
| | | FKKLQKQILSEKDWVFIDKIEDDGGFYEVLKNFYKNAAEKEWFLKNIFE |
| | | NFYTISDKNLEKIYFNKIAFNTISHKFWSALEFERILYEEMKKEKADWIKF |
| | | EKKENKYKFPDFIQIIFIKRSLENYDSENLFWKERYYKSEENVDWFLEKN |
| | | NNNIWEQFCKILNFEFLNILKRRIIDEAWEEYEVWFEISKNILWEKLENF |
| | | ELNQENKWIIKDFADYSLALYSFWKYFAVEKWRNWDLNIDISDDFYG |
| | | WEDWYIEKFYNTGYDEIVKPYNLMRNYISKKPWEDSKKWKINFETSSL |
| | | LSWWDKNLESNWSYIFQKWNKYYIWIINWSKPAKEVLEKLYSWNGE |
| | | KIKRFIYDFQKPDNKNTPRMFIRSKKDSFSPAVGKYNLPVEDILEIYDN |
| | | WLFKTENKDNSNYKESLSKLIDYFKLGFSKHESFKHFNFVWKDSKEYEN |
| | | IADFYRDVEKSCYQITSEFLDFEELKKLTFKKHLYLFQIYNKDFELDESLQ |
| | | KNWYNFRDEWQKNIHTKYFEALFLEENILRKSWAVFKLSWGWEVFF |
| | | RKESIKAEKEKRKNIEVTKNRRYTEEKYFLHFPIQVNFKNEISWNFNQEI |
| | | NKFLANNPDINVIWIDRWEKHLAYFSVINQKWEILESWSFNKIENYNK |
| | | NWEKLLFPEREIKEIHKDWSLIDLELVETWRKVDYVDYKLLLEYKERKRL |
| | | LQRQSWKEVEQIKDLKKWYISALVRKIADLIIKHNAIVIFEDLNFRFKQI |
| | | RGWIEKSIYQQLEKALIDKLNFLVNKNEINLEKAGSILKAYQLTVPVDSL |
| | | KEIWKQTWVIFYTEAAYTSKIDPIKWWRPNLYLKKQNAEINKENILKFD |
| | | NIIFNSKENRFEFTYDLKKFFWKDSKFPAKTVNTVCSCVERFKWNRNL |
| | | NNNKWGYIHYENLTDWKLANKEQKEDEFSNFKELFEKYFIDINWNILE |
| | | QIKNLDTKNNEKFFSSFIDLFTLVCQIRNTNQNAKWDENDFILSPVEPF |
| | | FDSRKSQNFWKSLPKNWDENWAFNIARKGLIILNRISENPEKPDLLIFN |
| | | ADWDNFARNI |
| 57 | cas13b | MTEQNEKPYNGTYYTLEDKHFWAAFFNLARHNAYITLAHIDRQLAYS |
| | | KADITNDEDILFFKGQWKNLDNDLERKARLRSLILKHFSFLEGAAYGKK |
| | | LFESQSSGNKSSKKKELTKKEKEELQANALSLDNLKSILFDFLQKLKDFR |
| | | NYYSHYRHPESSELPLFDGNMLQRLYNVFDVSVQRVKRDHEHNDKV |
| | | DPHRHFNHLVRKGKKDKYGNNDNPFFKHHFVDREEKVTEAGLLFFVS |
| | | LFLEKRDAIWMQKKIRGFKGGTEAYQQMTNEVFCRSRISLPKLKLESL |
| | | RTDDWMLLDMLNELVRCPKSLYDRLREEDRARFRVPVDILSDEDDTD |
| | | GTEEDPFKNTLVRHQDRFPYFALRYFDLKKVFTSLRFHIDLGTYHFAIYK |
| | | KNIGEQPEDRHLTRNLYGFGRIQDFAEEHRPEEWKRLVRDLDYFETGD |
| | | KPYITQTTPHYHIEKGKIGLRFVPEGQLLWPSPEVGATRTGRSKYAQDK |
| | | RFTAEAFLSVHELMPMMFYYFLLREKYSEEASAEKVQGRIKRVIEDVYA |
| | | VYDAFARDEINTRDELDACLADKGIRRGHLPRQMIAILSQEHKDMEEK |
| | | VRKKLQEMIADTDHRLDMLDRQTDRKIRIGRKNAGLPKSGVIADWLV |
| | | RDMMRFQPVAKDTSGKPLNNSKANSTEYRMLQRALALFGGEKERLT |
| | | PYFRQMNLTGGNNPHPFLHETRWESHTNILSFYRSYLKARKAFLQSIG |
| | | RSDREENHRFLLLKEPKTDRQTLVAGWKSEFHLPRGIFTEAVRDCLIEM |
| | | GYDEVGSYKEVGFMAKAVPLYFERACKDRVQPFYDYPFNVGNSLKPK |
| | | KGRFLSKEKRAEEWESGKERFRDLEAWSHSAARRIEDAFVGIEYASWE |
| | | NKKKIEQLLQDLSLWETFESKLKVKADKINIAKLKKEILEAKEHPYHDFKS |
| | | WQKFERELRLVKNQDIITWMMCRDLMEENKVEGLDTGTLYLKDIRT |
| | | DVQEQGSLNVLNHVKPMRLPVVVYRADSRGHVHKEEAPLATVYIEER |
| | | DTKLLKQGNFKSFVKDRRLNGLFSFVDTGALAMEQYPISKLRVEYELAK |
| | | YQTARVCAFEQTLELEESLLTRYPHLPDESFREMLESWSDPLLDKWPD |
| | | LQREVRLLIAVRNAFSHNQYPMYDETIFSSIRKYDPSSLDAIEERMGLNI |
| | | AHRLSEEVKLAKEMVERIIQA |
| 58 | cas13b | MESIKNSQKSTGKTLQKDPPYFGLYLNMALLNVRKVENHIRKWLGDV |
| | | ALLPEKSGFHSLLTTDNLSSAKWTRFYYKSRKFLPFLEMFDSDKKSYEN |
| | | RRETTECLDTIDRQKISSLLKEVYGKLQDIRNAFSHYHIDDQSVKHTALII |
| | | SSEMHRFIENAYSFALQKTRARFTGVFVETDFLQAEEKGDNKKFFAIG |
| | | GNEGIKLKDNALIFLICLFLDREEAFKFLSRATGFKSTKEKGFLAVRETFC |
| | | ALCCRQPHERLLSVNPREALLMDMLNELNRCPDILFEMLDEKDQKSFL |
| | | PLLGEEEQAHILENSLNDELCEAIDDPFEMIASLSKRVRYKNRFPYLML |
| | | RYIEEKNLLPFIRFRIDLGCLELASYPKKMGEENNYERSVTDHAMAFGR |
| | | LTDFHNEDAVLQQITKGITDEVRFSLYAPRYAIYNNKIGFVRTGGSDKIS |
| | | FPTLKKKGGEGHCVAYTLQNTKSFGFISIYDLRKILLLSFLDKDKAKNIVS |
| | | GLLEQCEKHWKDLSENLFDAIRTELQKEFPVPLIRYTLPRSKGGKLVSSK |
| | | LADKQEKYESEFERRKEKLTEILSEKDFDLSQIPRRMIDEWLNVLPTSRE |
| | | KKLKGYVETLKLDCRERLRVFEKREKGEHPVPPRIGEMATDLAKDIIRM |
| | | VIDQGVKQRITSAYYSEIQRCLAQYAGDDNRRHLDSIIRELRLKDTKNG |
| | | HPFLGKVLRPGLGHTEKLYQRYFEEKKEWLEATFYPAASPKRVPRFVN |
| | | PPTGKQKELPLIIRNLMKERPEWRDWKQRKNSHPIDLPSQLFENEICR |
| | | LLKDKIGKEPSGKLKWNEMFKLYWDKEFPNGMQRFYRCKRRVEVFD |
| | | KVVEYEYSEEGGNYKKYYEALIDEVVRQKISSSKEKSKLQVEDLTLSVRR |
| | | VFKRAINEKEYQLRLLCEDDRLLFMAVRDLYDWKEAQLDLDKIDNML |
| | | GEPVSVSQVIQLEGGQPDAVIKAECKLKDVSKLMRYCYDGRVKGLMP |
| | | YFANHEATQEQVEMELRHYEDHRRRVFNWVFALEKSVLKNEKLRRFY |
| | | EESQGGCEHRRCIDALRKASLVSEEEYEFLVHIRNKSAHNQFPDLEIGKL |
| | | PPNVTSGFCECIWSKYKAIICRIIPFIDPERRFFGKLLEOK |
| 59 | cas13b | MESIKNSQKSTGKTLQKDPPYFGLYLNMALLNVRKVENHIRKWLGDV |
| | | ALLPEKSGFHSLLTTDNLSSAKWTRFYYKSRKFLPFLEMFDSDKKSYEN |
| | | RRETAECLDTIDRQKISSLLKEVYGKLQDIRNAFSHYHIDDQSVKHTALII |
| | | SSEMHRFIENAYSFALQKTRARFTGVFVETDFLQAEEKGDNKKFFAIG |
| | | GNEGIKLKDNALIFLICLFLDREEAFKFLSRATGFKSTKEKGFLAVRETFC |
| | | ALCCRQPHERLLSVNPREALLMDMLNELNRCPDILFEMLDEKDQKSFL |
| | | PLLGEEEQAHILENSLNDELCEAIDDPFEMIASLSKRVRYKNRFPYLML |
| | | RYIEEKNLLPFIRFRIDLGCLELASYPKKMGEENNYERSVTDHAMAFGR |
| | | LTDFHNEDAVLQQITKGITDEVRFSLYAPRYAIYNNKIGFVRTSGSDKIS |
| | | FPTLKKKGGEGHCVAYTLQNTKSFGFISIYDLRKILLLSFLDKDKAKNIVS |
| | | GLLEQCEKHWKDLSENLFDAIRTELQKEFPVPLIRYTLPRSKGGKLVSSK |
| | | LADKQEKYESEFERRKEKLTEILSEKDFDLSQIPRRMIDEWLNVLPTSRE |
| | | KKLKGYVETLKLDCRERLRVFEKREKGEHPLPPRIGEMATDLAKDIIRM |
| | | VIDQGVKQRITSAYYSEIQRCLAQYAGDDNRRHLDSIIRELRLKDTKNG |
| | | HPFLGKVLRPGLGHTEKLYQRYFEEKKEWLEATFYPAASPKRVPRFVN |
| | | PPTGKQKELPLIIRNLMKERPEWRDWKQRKNSHPIDLPSQLFENEICR |
| | | LLKDKIGKEPSGKLKWNEMFKLYWDKEFPNGMQRFYRCKRRVEVFD |
| | | KVVEYEYSEEGGNYKKYYEALIDEVVRQKISSSKEKSKLQVEDLTLSVRR |
| | | VFKRAINEKEYQLRLLCEDDRLLFMAVRDLYDWKEAQLDLDKIDNML |
| | | GEPVSVSQVIQLEGGQPDAVIKAECKLKDVSKLMRYCYDGRVKGLMP |
| | | YFANHEATQEQVEMELRHYEDHRRRVFNWVFALEKSVLKNEKLRRFY |
| | | EESQGGCEHRRCIDALRKASLVSEEEYEFLVHIRNKSAHNQFPDLEIGKL |
| | | PPNVTSGFCECIWSKYKAIICRIIPFIDPERRFFGKLLEQK |
| 60 | cas13b | MDTPNFSERIPVSLQSHPYYFAHYLNMARHNAYVILEYVNRELIKPGK |
| | | NLDEDNLIQSTVLKDGYFDRKPDELSHRNRLLVQHFPFLREAENEGAR |
| | | TCNPVSYKLKTALAALNQWRNNASHYPLNQNHEKDFDLQPFFSFAIE |
| | | ACKKRMREVFQPDDFYLLETNEKQFYTLHNENGFTEKGLYCFICFFLEK |
| | | KYAFQFLAGIKGFKNTTDNKFRATLETFTEHCCRLPKPKLDSSDIKLDM |
| | | LGELSRCPAPLFDLLDIEERKKFIREPEEVKPDESGDREEVQQVLMKRY |
| | | DDRFPYFALRYFEEKNLLKGISFHIHIGRWIKSEHTKKIMGAERDRRLLK |
| | | DIRTFGELKEFSPEHAPDYWLRDGITPDDVDQFSPQYRIVGNRIGIKLN |
| | | YNGHNRWSVPDKEINVKPDAIISTYEFLNLFLYEHLYQKKLTGLSPAEFI |
| | | QDYLDRFNNFLSEFKAGHIRPVGDFSLEKRRGQGDEPDLTARRKSLQK |
| | | ELDRFVLKGKDLPDKIREYLLGYKQKSEKKQAKWILGGMIKETVYWRN |
| | | KAEQSPEKMRSGDMAQQLARDIIFLTPPHTVKEHKQKLNSLEYDVLQ |
| | | YALAYFSSNREKLYSFFKEHQLTVKGDRAHPFLYKIRLDECQGILDFFIVY |
| | | MQQKEKWLGWLDRNLKSPRLNEEEFFNTYSYFIKTDTKRAIEMDYES |
| | | CPNYLPRGIFNEPIAKALQKAGVKIKDEDNASYALSVYSNGKTQPFYNK |
| | | ERYYNKGIFRMEELPEKLQPKELLGKIQWTIKSSGKDTEEFRSLQNLKN |
| | | RILNTEKEIRYVQSTDRALWIMVADLFPETFELRPDDLECIGHDLSDDLL |
| | | SRPYQMKEKVYNYTITDYLPIKRYGEFRRFLKDRRLENLLTYFEEGVPLH |
| | | REALVAELEAYDLQRKNLLEIIYRFEKLVFDRHRHELTFSGEGENQYVN |
| | | HWDYLDFVARKYGLSAEVKELNSERFTELRNKMLHNQIPYQLWIKEAl |
| | | AAREENTVCGRIMGMIGEIYERMTTEIEKQMQV |
| 61 | cas13b | MFDNEQKNLEKEPYWGVFLNQARLNAYIALRDISERLEENAADEDSLS |
| | | EWPVLKYLDNDTDAVKSRRIFDLVEKHFSMLKIIYGGEKEGDLVKRSKE |
| | | YKIILKCLFRALNFYRNKFCHMYSGNRARKYNEKELIKYLEDCFDASVRK |
| | | IKELRRLDEKDVLHLRRKIAEGKDANKRVIDNPQFRYPFKNEKGELNEK |
| | | GLYFLASIFLDKKEAHEFLKKQEYFKNDSEPKYRATLESFYHYRIKLPRPV |
| | | lESDVDKNGLALDMLNELKKCPKELFDLLSKEQQEKFRVVDSEDADEE |
| | | GNEILMRRYSDRFPYLALRYCDENQVFERIRFQIDLGRYYFKFYPKETID |
| | | GKTQQRSLDKRLKIFGRIKDVKSKVEQEWSGIIKSPDTIEENPNEPYKLK |
| | | TTPRYNIVDNQIGFVITGDKNLPDVKRPDGRIELEKPDGWLSIYELPGM |
| | | LFHGLKYGFDKTERMIKIYIEKQRKICKEICEKGTITPDDGESMPEALKG |
| | | GAKAAKRNYSEKKLERMLQDTEQRIRAIQTTQKRMDEPGNKPGKKKF |
| | | FDIRAGKLADFLARDIMALQRFDPAKHGKDKLTAINFQVLQATLAFYG |
| | | AKKDVIEDMFKGIGLLEGDNPHPFLNQIDPAQYNSIAGFYQAYLQKKR |
| | | SYLEDYRKEEEYDEQFLRPKRQRYAQEKREIKTVARQLLDNPVNVPKN |
| | | FFKKEIEEFVFSQDPSLKKSKMNTAYMIQALFEKHYGRQQPFYSYNRT |
| | | YPVVSKAIEYGKKGKNKKIAKVLMAIEPKLNYMEIKKIVNEMPDGQYE |
| | | PENLKRNLYEGYKDYEKDERIIRRCKVQDVVSFMMVEETLKDQLDFN |
| | | GNVLTLEKITPWEASPFKKPVLCHTIISIPFNTKGGHTDKDYVDFIKNNF |
| | | EGSYDCEPNKIILKYKVTSKDTKLKDIGKYRMYSHDRRLPGLLIWKYRP |
| | | NDQNGNEIKFTEIEQEIKAFERRRIEIAQCLYTLEKKVIDSWFTQDELGE |
| | | EHIPFNKVIDVIKAKMPNFEDKCNVLLKIRNAINHNQFPVYEQAIQTAP |
| | | GKEIAGKMLRITESYIEQIMAKIDPDFGRTEDAESSR |
| 62 | cas13b | MDTPNFSERIPVSLQSHPYYFAHYLNMARHNAYVILEYVNRELIKPGK |
| | | NLDEDNLIQSTVLKDGYFDRKPDELSHRNRLLVQHFPFLREAENEGAR |
| | | TCNPVSYKLKTALAALNQWRNNASHYPLNQNHEKDFDLQPFFSFAIE |
| | | ACKKRMREVFQPDDFYLLETNEKQFYTLHNENGFTEKGLYCFICFFLEK |
| | | KYAFQFLAGIKGFKNTTDNKFRATLETFTEHCCRLPKPKLDSSDIKLDM |
| | | LGELSRCPAPLFDLLDIEERKKFIREPEEVKPDESGDREEVQQVLMKRY |
| | | DDRFPYFALRYFEEKNLLKGISFHIHIGRWIKSEHTKKIMGAERDRRLLK |
| | | DIRTFGELKEFSPEHAPDYWLRDGITPDDVDQFSXPQYRIVGNRIGIKL |
| | | NYNGHNRWSVPDKEINVKPDAIISTYEFLNLFLYEHLYQKKLTGLSPAE |
| | | FIQDYLDRFNNFLSEFKAGHIRPVGDFSLEKRRGQGDEPDLTARRKSL |
| | | QKELDRFVLKGKDLPDKIREYLLGYKQKSEKKQAKWILGGMIKETVYW |
| | | RNKAEQSPEKMRSGDMAQQLARDIIFLTPPHTVKEHKQKLNSLEYDV |
| | | LQYALAYFSSNREKLYSFFKEHQLTVKGDRAHPFLYKIRLDECQGILDFFI |
| | | VYMQQKEKWLGWLDRNLKSPRLNEEEFFNTYSYFIKTDTKRAIEMDY |
| | | ESCPNYLPRGIFNEPIAKAVQKAGVKIKDEDNASYALSVYSNGKTQPFY |
| | | NKERYYNKGIFRMEELPEKLQPKELLGKIQWTIKSSGKDTEEFRSLQNL |
| | | KNRILNTEKEIRYVQSTDRALWIMVADLFPETFELRPDDLECIGHDLSD |
| | | DLLSRPYQMKEKVYNYTITDYLPIKRYGEFRRFLKDRRLENLLTYFEEGV |
| | | PLHREALVAELEAYDLQRKNLLEIIYRFEKLVFDRHRHELTFSGEGENQY |
| | | VNHWDYLDFVARKYGLSAEVKELNSERFTELRNKMLHNQIPYQLWIK |
| | | EAIAAREENTVCGRIMGMIGEIYERMTTEIEKQMQV |
| 63 | cas13b | MKTLGALSSHNYNNKKYYFSGLLNTAQYNFNLALQEVNDRLGKKGKN |
| | | PGKTMIKNIFDQKDSFSTQERAMYYLEEFFPWIFLVMKQSGINIPTEE |
| | | QETKLHKEEIQLIQEHLISLYELLDDLRNEQTHYMHDPVIIPEEVSKMLD |
| | | ALLLQILKNTRKKCKDDEYRTFIVKKYQEEFQKEIKVQVKDRFGKEKEKI |
| | | VTGEVKENYVINRCFRKWIQKEGEEETLRYSTVQEEQGKYVWSSSGFV |
| | | FFLSLFLRRKELEDVMNHVPYFKDSRKLLFYLTRKTFSSYCFRDLRKSLRS |
| | | DYSNDSLLMQMIEELYKCPGELYEVLLKEQKQEFIEDINEYYKDNPEFE |
| | | GSANEAQVIHPVIRKRYQDKFPYFALRFIDEYFNFPTLRFQLVLGEYVT |
| | | DRRTKELQGTALFTDRVISQRISYVGKLSEAEMNKKREGYTETGWKEY |
| | | PNPYYKIENNRIPLYIEFSKNEELIFKEKKFKYNTLAKWENREIDKRTGEF |
| | | NQVNKQRRITQLEEFKIDNPKKMKTPNVFLSIYELPALLHALLIEKKTEA |
| | | EIEDIIKAKIKKQLTEIAEGRRNLSGLPKGIKKMRNCNSDFEKKKLISDID |
| | | NEIKKGEKILEEVQQWLNPVINKKGTGKQENNKPFFSNTYRGKYATW |
| | | LAYDIKRFTGKDHIQNWKGYQFSELQTLLSLYTLRKEELKNFLEKDLQLT |
| | | SHPFLKEALKAVNLEDFMGAYLRGRQFFLEKAKKQIGIKGVKKSIFQYF |
| | | EERKYKIYSSNLDYWEELWKHPVNLDRGLFDERGTVYNKNKELNDLQ |
| | | NRAAWFSFAETNPKQQFYHFPRIYSDEDITKPVTDRYGKTKEKLILFKLS |
| | | PQKGFMEQIPSDLKKKYQEDKGKVEHPEVQKEKKYEEKKHPGINAFIK |
| | | NAYKNEQKIRRISRNDIFLYEMVKYMLNKISPATEFSSLDKVWLTRIERE |
| | | KQATEAREQSFKEKGDTSENKIRQDYLLSFPITLTLFNDIIKEKVKIKDIG |
| | | RFRKLEKDERVQTMISYYTSGLWKNDQPSLTIKELEAELESYHKIRLQEI |
| | | FKEVHKLEKEIYEFTPEEDKSKLLARESFPKFKYYISFYFIPKEDQEVFNEI |
| | | QFDKYKNLEQIPGRKPEYDPYYLLIFIRNKFAHNQLPAEPIYKTALTFLP |
| | | NNFNTLAEYYHKLFILLNNKNYNN |
| 64 | cas13b | MNILPAAPEKEKIAYSTATAPWFFGAFLNQARHNLFLTVNDLAIRLGE |
| | | KVIDYDDQLLNSNVVRMLVNEKASPLQLEILMKYLDRHLPFLIPMQVA |
| | | LKGHQGDASDNPVIGSPADYGAILSKLIVCLNAARNHFSHYHSTSGWS |
| | | GYNEVIEWMEHVFTRNIETVVKRFTLTEEEVQHLKKPVDKSPKGTIPPY |
| | | YFSFCKGDIWTDTGLAFFICLFLTREEAYLFLKKLRGFKRGEERFHKATLE |
| | | AFCVGSLKVPRERLESNNSPQSAFLDMCNELVRCPKSLFDLLEPEKQEL |
| | | FRRDPEPEDAEDNGIEEEEDQPQALLVRKENRFSYFALRYLDIAKAFPR |
| | | LRFGVDLGTYFFSVYPKTFAGIEETRQLSKRLIGYGKLEEFAREKRPEHIA |
| | | ALFRSKEEANAAPTEPFIRETAPHYHLDGNNVYLYMSGDGEAQWPAV |
| | | ELEEVTGKSYPRKLVKKSTLLPFAVLTVNELPALLFYHLLHKEKGAGDAA |
| | | ERVIINHMERVKRFFKALQDDKVDQVAGQPIRKPDVDADESLHMEY |
| | | DRRWKLLKKKLSEYQLRASYIPEKIINYLLNIEAVDLGDKAMAQLKNLQ |
| | | RQAQDDIAAIERRMEHLMKKGADGRKTLKVGNLAQQLAEDMLQM |
| | | QPVQIGTDGEPVPASKANNLAFRLLQSHLAYFAENRHNLPAVFEACGL |
| | | IGASNKHPFLDNINIESCKGVVDFFILNFRNKLDFLDRCLQEGEWHRYH |
| | | FISAAKLKSGAKVTIKKYLNEAFESKGRNHIPFTLPPSLFLDASLDWLAKF |
| | | GDGKAKKVLAENEYVNSVFLIRRLFADGGLQPFYAWKREYRLFEKKAG |
| | | KAVFLDEAGRMRKADKIGIEVERHREFLARPVKKGKQYDIKKAAAEQF |
| | | LRSYRFYLQEEKYIRLLAAQDMLLFRCICDLLTYHVGDIGLEELAEAKAG |
| | | TFSLANITPEKTETAKSLLNYRPAGGVVLDRHFYATDEKGAFVKQEGKL |
| | | VPGGQVRIFDNTLKIKNAGNFRKLLKDRRMNNLFFYFKQHADEPVVL |
| | | HRMVLENELRAYDRMRLKVLPVIAEFEKKLYQHCTDVEKERLVVNGS |
| | | MHHRCYLDVYREKYQPDWGWEAAGNLLRIRNAFVHNQFPLMEGD |
| | | GFKLEVAHWKKINADFVPSEQGSSLGYGIIDRLGQLAVEGYEGLIKNIH |
| | | V |
| 65 | cas13b | MGEEEQAHILENSLNDELCEAIDDPFEMIASLSKRARYKDRFPYLMLRY |
| | | IEEKNLLPFIRFRIDLGCLELASYPKKMGEENNYERSVTDHAMAFGRLT |
| | | DFHNEDEVLQQITKGITDEVRFSLYAPRYAIYNNKIGFVWTSRSKKKSF |
| | | PTLKKKEGEGHRVAYTLQNEESFGFISIYDLRKILLLSFLDEGKNIVSGLF |
| | | KQSKANWENLSENLFDAIRTELQKEFPVPLIRYTLPRSKGGKFVDPKLA |
| | | DKQEKYESEFERRKEKLSEILSEKGFDLSQIPRRMIDEWLNVLPTSKEKK |
| | | LKGYVETLKLDCRERLRVFEKREKGEHPVPPRIGEMATDLAKDIIRMVI |
| | | DQGMKQRITSAYYSEIQRCLAQYAGDDNRRHLDSIIRELGLKDRKKGH |
| | | PFLGKVLRPDLDHTEKLYQRYFKEKKEWLEATFYPAANPKRVPRFVNP |
| | | PAEKQKELPLIIHNLMKERPEWRDWKQRKNSHPIDLPSQLFENEICRLL |
| | | KDKIGKESSGKLKWNEMFKLYWDKEFPNGMQRFYRCKRRVEVFDKV |
| | | VEYEYSEEGGNYKKYYEALINEVVRQKISSSKENSKLQVEDLTLSVRRAF |
| | | KRAINEKEYQLRLVCEDDRLLFMAVRDLYDWKEVQLDLNKIDNMLGE |
| | | PVSVSQVIQLENGQPDAVIKAECKLKDVSKLMRYCYDGRVKGLMPYF |
| | | ANHEATQEQVEVELRHYEDHRRRVFDWVFALEKSVLKNEKLRRLYEK |
| | | SQEGCEHRRCIDALRKATLVSEEEYKFLVHIRNKSAHNQFPDLEFGKLT |
| | | PNVTSGFCECIWSKYKAIICRIIPFIDPERRFFGKLLEOK |
| 66 | cas13b | MRIPKLIEEHKSVFGAYSTMALSNVETVLNHIAERAGLDGYERDRGPG |
| | | VEDYWEHPVMQCLCRKDKPRSIPSDVLLDVRNRLFRSFPFLKIMAEN |
| | | QRDYRNAKGKVECVEINESDIFVVLNNSFRVLKAYRDTCTHYLIENRIW |
| | | EDNSPMLMYNECPLAAMVNQYYTAALRVTKERYGYETRDLTFIQKRR |
| | | FKQEPEKEASGNVKKKAVPDLAFFLSLVALNGDGRKWLHLSGWGVVL |
| | | LICLFLEKKYVNVFLSKLPNPGNYPPSSKERRIIRRSMGVCSVVLPKERIH |
| | | SETGDLSVALDMLNELKRCPRELFDTLSPGDQERFRTISSDHNEVLQM |
| | | RSKDRFAQLVLQYIDHNRLFENLRFHVNMGKLRYLFNPKKYCIDGQTR |
| | | VRVLEHPLNGFGRLQEMEEKRLQENGPFARSGIKVRCFDEVRRDDAN |
| | | ESNYPYIVDTYTHYVLENDMVEMFFCPEGSGMKMPEVTSREGKWYV |
| | | DKKVPHCRMRMSVLELPAMLFHLLLCGAKNTEVHIGKVCDNYCHLFS |
| | | DMAQGNLTEENILSYGIKKEDIPQKVWDCVRGVHMGKDSRAYREKEI |
| | | RERYEDVTRRLERLEADRKAVLGGENKIGKRGFVQIVPGRLAAYLATDI |
| | | CRLQPSLRKGDGYGTDRLTGLNFRLLQSSIATYNCGESDILYGRFRDVF |
| | | CSAGLIGGDNPHPFLDKVLPEAYSVCCPRNTIEFYERYLEEYQRYLKPLV |
| | | IKLEKGKVPSLSFVNEGQRRWARRDDAYYHELGNLYLSQAIELPRQMF |
| | | DDEIKDKLREMPEMRDVDFDHANVTFLIGEYLKRVRHDESQEFYSWP |
| | | RHYKYVDMLKCILNPKNGSLQAVYIQMGEREGLWQERSELEEKYAKIR |
| | | LRDLGRKGLDKDEANERIKTGLGNRKKEYQKAEKVIRRYKVQDALLFM |
| | | LAKNTLFNSVEVDDERFKLKDIMPDGEKGILSEVVPMDFCFRSGNSAT |
| | | RKLMGTIHSDNTKIKNYGDFFALANDKRMVTLLPLVGEQCLVKEEVKE |
| | | EFDKYDDCRPEMISMVFDFEQWAYSAYPELKELVSNEAIKGRLFSNLL |
| | | QELLGRGELTYEEKYALVGIRNAFLHNSYPKDGGVVKVRTLPDIAKSLK |
| | | DVFKEYIRLE |
| 67 | cas13b | MKMFYKSVLTAFFTAVDSLRNKYTHYSHKDLNIREIKIECTLGGKDYCI |
| | | GLLNALDCIYDSAVNLLKLRFMAGEDEVAHLRRCKAVNKKVVVRTEKD |
| | | GFYYRLSDNGGVTEKGVIFIASMFLNRKYGFLFLKQLEGFKRSDEKRYR |
| | | LTLEAFLAFSNIKPVDRLKSDKLDRASLGLDMLNELTKIPKELSETLSVDC |
| | | LYKYLASDGEDDLRSRIRYQDRFVPLALEFISQSDEFKDFRFYTYVGNYV |
| | | YKGYIKRLIDGTDKERYLSDRLCGFYKSVNDASSDAIAQKYGVEIKDSNE |
| | | PDYMLPDSFRPHVLRATPHFVINTNNIGIKICGNDCLPIVNGKGVESPE |
| | | PDYWLSIYELPAMLFYAYLREKNGKRFKDYKSIRELIEGVEKKADEKND |
| | | RDKGALMARHIDKEIIWTQTKLDEVKRLEEKKVAAYGKKGRVVLKAGR |
| | | MADLLAHDMVRLQPATKGSDKITGANFQALQVSLAYFKRDILADVFS |
| | | RAMLTTGNHRHPFLYRIDVSHCSSLRDFYVAYLGERRKYFEDVAKKIAK |
| | | NKLNTPCHILRRLQREGSGEEAGKDVKPKFLPRGIFTDSIKNCLEQSKL |
| | | NIYIRNARNDVKPAINAAYLILMYYKEIEKGEFQGFYGEKRRYDILEEGK |
| | | PLDLAERKKALASIKPAKIDVSEANMPMSKEEHLMRKRYHAVCNNES |
| | | AIRMYQVQDILLLLMAKDIFKKALSEGVMSKKIGLENLNGIFDAPVNFV |
| | | KNFDNIKLTATGIKIKDYGKVCRLGTDFKFNSLIKAFHKVYSKSVEMDYS |
| | | DYLKEEEEFEKYRLNMVKLCREVERGITEDLHLSLDGKSHLSFNDDVIKP |
| | | YNDKYNVFNGGDLTFFINARNMFMHGDYKYECVKYVVSEHFKGSLN |
| | | DVSFAKETYGHFCNLLESMRKKTGLRIDI |
| 68 | cas12g | MLPTRYKPARTLVRPLGRLPHEPRKEFVEKCRRVRMHFEQFNIDVADL |
| | | CQWLMSLRPNTRIGDAQSTVFWDFFLNPSILTVEADEKERDRWRLAA |
| | | FDELLQIRFGHDPNAPPWSEEFRSAIRHVAQRPKSATAQRLFDRLRSL |
| | | TAPHRLVLLKSAAEWIIARYQRGMENWQRQFAEWQREKEEWEAAH |
| | | PNLTPEVRDAFTRVFKNLFENPDGDGKIGVRRKNPRICSWERLKLNKD |
| | | NCVYAGQKGHGPLCWEFSKFVKAQKNAGTIKTFFVDVANKYLHVRR |
| | | NLSKPGVKLKKSPRQEAFKRLYNQKGMEKARNWFTDAWSGYLTALN |
| | | LNEKTILDHGCLKHCGAIGAEFEKSLCQFNPHTHLCVQ.YRNALESLEPA |
| | | IRELEGDYREWRRLFLAPPRKPSFRYPSSRRLPMPKIFGEHFHQIDFDQ |
| | | SILRLRLEDMAEGEWIEFGFKPWPKDYRPGKDEVRVTSVHVNFHGNR |
| | | MRAGFHFEAPAKPSRFACTQDELDDLRSKQFPRQSQDRQLLEVARRR |
| | | LLESFDGMLESDLRILAVDLGEKGAAAAVYQGHGHEADVAIPIVKIDRL |
| | | YDHVPDVLDVESARVPPPKFDDSRDPRGVRKEHVGRHLGQLQRGAQ |
| | | TLAQHRQQDESAPAALRRHDFRSLTRHIRWMIRDWTRHNAAQITAA |
| | | AETHRCHLIVFESLRGFKPRGYDQMDFAQKARLAFFAYGRVRRKVVE |
| | | KAVERGLRVVTVPYGFTSQICSECGHRQRNKGRLRKNKYQRRFVCEC |
| | | GEPKKSANKTAAPDRSATVSPCTCRLQLGSDVNAARVLARVFWDEIV |
| | | LPTREEMREPAVDSAPPSK |
| 69 | cas12g | MCLCTLSGRTRQEEEIIGSTQYTEARSLVRRIRRPRGESRRQFKSNVLLL |
| | | RRHFEQFNVDASEICQWLMGIRPGGRHADESTGPFWEFFLDPGRFLR |
| | | ETGRGPEDADERIDAYRRIAFDVVAGIEDESRMSDPSIPRQIVESLHAV |
| | | SMATRTESARRLFERLAGLEPSHRQILLKAAAEWIVSRYWRSVQGWP |
| | | DRYKHWSDEKEEWEKAHPRLTESLREEFTGIFRDLGIRRKKPRVCPWE |
| | | RLEKGMDNCMYAGERIKVGYSRQSHSQLCAKYERFSYKQRQRTKSGK |
| | | NFKSYFVKNAELYLKLRRKNRSLIKKDVMKLFRKKVPQALWFEKAWDE |
| | | YLKALGVDEATLTKDGKLPHCTQFADDKECLFNRHTELCLQYRERLLRL |
| | | PHLQELEQLYREWRDKYLSGPRRPSLRYPSKRTLPMPKVFGRGYFCAD |
| | | FTNSLLDLRLEGMGEGDFVRFGFAPWPADYDAQPSDATVTSVHIHFV |
| | | GTRARAGFRFQAPHKTSRFASSQDEIDDLRSRKFPRAAQDGEFLDAA |
| | | RKLLLESFTGDAEREMKLLAVDLGDRGAGAAVFEGRCFKEAMPLKIIK |
| | | TDTLIDKPPPVTKTPRKGKPGKRESKRARGLDKYHVARHLDTWRKGA |
| | | RKIAERRAKGEADPVKLGAHDMRSLSLHVRWMIRDWVRLNASQIIKT |
| | | AESHKTDLIVLESLRGFSAPGYHKLDDEKKRTLAFFAYGRIRRKLTEKAV |
| | | ERGMRVVVAPYLRSSQVCAECGREQIDRNKLMKDKRKRRFICEYSDC |
| | | TWQCDSDQNAACVLGRVFWGEIELPSERKKD |
| 70 | cas12g | MHPSRYKTARTLVRRLCRLPGEDRSAFRSKVGLLRGHFEQFNVDVSEL |
| | | CQWLMSLRKRNKVPENPATFGALGDFLLOPGLPGEETDEKEADRLRL |
| | | AVFDAVAGFRMLEDRLAASIPASLSDAIRDEAVFLAGVRAAGKPSGLA |
| | | RVLARLEACAPAQRLVLLKSAAEWIVARFLRGTENWMRQRAEWEKE |
| | | KAAWEAAHPHLTPEVRAQFNKIFESLHDPENSGKPGVSRKNPRICPW |
| | | DRLKQNLDNCCYGEKGHSALCWRYQDFLKQRMGENRRDKKNFSAT |
| | | AMDLAQICREWKIQHSRNALNNPRVLDRLFAEHERRKQDKTKKESRS |
| | | PKPRQGGYKANPKADYLRSFKAHWKAYLEHMKLNDTTVLERGCLPH |
| | | CLSIKKNGKESTCKWNKHTELCLEYKRSLAPLPDSVLELEPEYREWRRL |
| | | YLHGPGRPHFRYPSAGELPLPKVFGEGFHQVDLDRSIVRLRLEGAAEG |
| | | EWLEFGFIPWPRGYQPSRREVLITSVQVHFVGTRPRAGFRFDVSHRTS |
| | | RFGCSQDELDELRSRRYPRQAQDKEFLAAARAQLIQTFEGGEGAARQ |
| | | QMRVMSVDLGEGGACASIYEGRTHQKDESLKVIKIDRRYDQHPEVLE |
| | | KDVGAAKPQKFEKSDPRGVRKEHVARHLNRIAAGASAIAEHRRKERS |
| | | DAECSVGELQEHDFRSLKRHIAWMIRDWVRLNAAQIIDVAKQHCCDL |
| | | IVFESQRGFRLPGYDELDRGKKQRFAILAFGRIRRKVVEKAVEHGMRV |
| | | VTVPYFASSQVCSACKRVQENRGSWRENKKKRVFACEFCKLKLNSDA |
| | | NASRVLARVFWGEIELPEPTRAHLPSKA |
| 71 | cas12g | MPVSRYSESRTLVRPLARLPHEERQDVTPKVARLRRHFERFNVDVAEL |
| | | CQWLMGLRNQFGPKESPASFGPLGDFLIEPALDNIDADETERDRWRL |
| | | AVFDAVAGFRPIRGLGDHPVPDTLRLAMQQAASLSPTPTTARLLERLR |
| | | PLSPAHRLVLLKSAAEWIVARYQRGMENWVIQHAAWHKEKEAWER |
| | | EHPALTPAVRERFTALYKQLSDSKPTDRPVSRRKNPRICEWERLRQNID |
| | | NCCYAGEKGHGPLCRKYANFVKARKAVDGKFNDLLFWDTATSFIALC |
| | | RKFNVTRARNALQSQLDALFAEDQRRKAERDQAKGRQPRPLHPQAA |
| | | ARAKSDFLRIFKDGWNAYLSAMGLNDSTAIEKGRLPHCQKIGGTFENS |
| | | KCEWNPHTDLCHQYRRLAGQLDDATLALEKDYREWRRLYLAGPRKPS |
| | | FQYPSSRDLPMPKIFGAGFFELDMDRSILRLRLDDMVEGEWLEFGFKP |
| | | WPREYTPSRAQVARPGRITSVHVNFIGSRCRVGFRFEAPHAGSRFGCS |
| | | QDEIDQLRRDHPRERDDQPFLEAARKRLVETFAGDARRDLRLLAVDV |
| | | GEKGCCAAVYQGTRYVADALLPIIKINQLYTEPPTELKPDSHNRPAPDR |
| | | RPFNDEKDPRDPRGVRKEHVARHLKRMADKAPEVAAYRLAQREKAA |
| | | PSPSASPPPVTLGVHDFRRLKRHVTWMIRDWARHNAARIVAEAQRH |
| | | GCDLIVFESHRGRRPPGYHEVGDDAERRKLDNATFAFGRIRRKVTEKA |
| | | VERGLRVVTVPYHCSSKVCSRCGRLQENDGLLRRNKKERKFICEQCKF |
| | | ETNSDGNAARVLARVFWGEIMLPSPEERRKKREGSGGRSPTPANPG |
| | | GLVDAPPSRRNLR |
| 72 | Cas12 | MEDYSGFVNIYSIQKTLRFELKPVGKTLEHIEKKGFLK |
| | | KDKIRAEDYKAVKKIIDKYHRAYIEEVFDSVLHQKKK |
| | | KDKTRFSTQFIKEIKEFSELYYKTEKNIPDKERLEALSE |
| | | KLRKMLVGAFKGEFSEEVAEKYKNLFSKELIRNEIEKF |
| | | CETDEERKQVSNFKSFTTYFTGFHSNRQNIYSDEKKST |
| | | AIGYRIIHQNLPKFLDNLKIIESIQRRFKDFPWSDLKKN |
| | | LKKIDKNIKLTEYFSIDGFVNVLNQKGIDAYNTILGGK |
| | | SEESGEKIQGLNEYINLYRQKNNIDRKNLPNVKILFKQI |
| | | LGDRETKSFIPEAFPDDQSVLNSITEFAKYLKLDKKKK |
| | | SIIAELKKFLSSFNRYELDGIYLANDNSLASISTFLFDD |
| | | WSFIKKSVSFKYDESVGDPKKKIKSPLKYEKEKEKWL |
| | | KQKYYTISFLNDAIESYSKSQDEKRVKIRLEAYFAEFK |
| | | SKDDAKKQFDLLERIEEAYAIVEPLLGAEYPRDRNLK |
| | | ADKKEVGKIKDFLDSIKSLQFFLKPLLSAEIFDEKDLGF |
| | | YNQLEGYYEEIDSIGHLYNKVRNYLTGKIYSKEKFKL |
| | | NFENSTLLKGWDENREVANLCVIFREDQKYYLGVMD |
| | | KENNTILSDIPKVKPNELFYEKMVYKLIPTPHMQLPRII |
| | | FSSDNLSIYNPSKSILKIREAKSFKEGKNFKLKDCHKFI |
| | | DFYKESISKNEDWSRFDFKFSKTSSYENISEFYREVERQ |
| | | GYNLDFKKVSKFYIDSLVEDGKLYLFQIYNKDFSIFSK |
| | | GKPNLHTIYFRSLFSKENLKDVCLKLNGEAEMFFRKK |
| | | SINYDEKKKREGHHPELFEKLKYPILKDKRYSEDKFQF |
| | | HLPISLNFKSKERLNFNLKVNEFLKRNKDINIIGIDRGE |
| | | RNLLYLVMINQKGEILKQTLLDSMQSGKGRPEINYKE |
| | | KLQEKEIERDKARKSWGTVENIKELKEGYLSIVIHQIS |
| | | KLMVENNAIVVLEDLNIGFKRGRQKVERQVYQKFEK |
| | | MLIDKLNFLVFKENKPTEPGGVLKAYQLTDEFQSFEK |
| | | LSKQTGFLFYVPSWNTSKIDPRTGFIDFLHPAYENIEKA |
| | | KQWINKFDSIRFNSKMDWFEFTADTRKFSENLMLGKN |
| | | RVWVICTTNVERYFTSKTANSSIQYNSIQITEKLKELFV |
| | | DIPFSNGQDLKPEILRKNDAVFFKSLLFYIKTTLSLRQN |
| | | NGKKGEEEKDFILSPVVDSKGRFFNSLEASDDEPKDA |
| | | DANGAYHIALKGLMNLLVLNETKEENLSRPKWKIKN |
| | | KDWLEFVWERNR |
| 73 | Cas12 | MKKFTNLYSLSKTLRFELIPQGKTLENIQKSGILEQDNSRAEKYEKIKKI |
| | | IDDYHKFFIEKSFTGKKIDDYFLNQYFELFKIKDKDEEQKKDFKSIQEN |
| | | LRKNIISFFDKNKLKRLFEKEIIKEDLPNFVKEEEDKKLISEFDKFTTYFV |
| | | GFHENRKSMYSEEEKSTSIAYRTINENLPKFINNIFVFEKISKTPISENF |
| | | RELYKDLEEYLNVNDIQDIFKLNYFSNVITQKQIDVYNLVIGGKTLEN |
| | | GTKIKGLNEYINLYNQNQTDKKNKLPLLTVLFKQILCDRDTISFLPEQF |
| | | ENDIDVLDNIKNTYSNMEKSIKDIKDLLSNLKDFDLSKIYITNDIALTDI |
| | | SQQVFNNYSIIINAIKENIKKENPKKKTENEEKYGERIDKIFKSNNSFSI |
| | | KYINDCIKEKNIEIYFMDFGKKENNKKVKNLFDELQNNYSMVKDLLE |
| | | YKKIQSLIQDEKSIELIKNFLDSIKNIQHFLKPLYVKDNDIVKDISFYRDF |
| | | EELYLNIDKITPLYNKVRNYVTQKPYSVKKIKLNFENSTLLAGWDLNK |
| | | ERDNTCAILRKDDLYYLAIMDVNNRNVFNEKGIDGIGYEKMEYKLLP |
| | | GANKMLPKVFFSKSRIKDFNPSEQIIRNYEKETHKKGSNFSLKDCHKL |
| | | IDFFKSSINKHEDWKNFNFKFSNTDKYEDLSGFYREVEQQGYKITFR |
| | | NISKEYVDKLVEEGKIYLFQIYNKDFSKYSKGTPNMHTLYWKALFDE |
| | | DNLKNVVYKLNGQAEIFYRKGSIEKENIVIHKANNAIENKNMDNKKK |
| | | QSKFEYDIIKDRRYTVDKFQFHVPITLNFKAIGNERINEQVNQYIKDN |
| | | NIKHIIGIDRGERHLLFLSLIDLKGNIIKQFSLNEIVNEYNGNSYKTNYH |
| | | MLLEKREEERDKARKSWKTIENIKELKEGYISQVIHKITQLMIEYNAIV |
| | | VLEDLNFGFMRGRQKVEKQVYQKFEKMLIDKLNYLVDKKKDKNEA |
| | | GGLLKAHQLTNKFESFQKMGKQNGFLFYIPAWNTSKLDPITGFVNL |
| | | FDTHYTNVDNAKKFFENFEDIRFNEKKNYFEFIVNDYTKFNTKAEGT |
| | | KLNWTICSNEDRIKTFRSSSKNNQWVSETVNLTDSLIELFKKYDIDYK |
| | | LELKEQIISKSEKNFFETLLYLFKLTLQMRNSITGTETDYLISPVADKTG |
| | | NFFDSRKGIENLPNNADANGAYNIARKGLWVIEQIKKAKDLKKVKLA |
| | | ISNKEWLQFVQGK |
| 74 | Cas12 | MAKNTIFSQFTGLYPVSKTLRFELKPMGKTLEKIKETGVIENDKKRHN |
| | | DYFDAKKIIDKYHKYFIDAALSKFPRIDWSPLKEAIERSLDRSDASKKKL |
| | | EKTQTEFRKKIAKALTTHDHYKELTASTPKDLFLKVFPDHFGKQPAID |
| | | TFDGFSSYFTGFQENRQNIYSDEAISTAIPYRLVHDNFPKFLSNIEVYK |
| | | TLKDNAPSVLSDAENELRDFLNGKSLANIFELNAYNEVLTQSGIDFFN |
| | | QVIGGISDEGGEKKTRGINEFSNLYRQQHPEFAQKRLATKMIPLYKQ |
| | | ILSDRETKSFILESYSNDSQVQNSVKEFFESQILNWDIAGRRVNVLNE |
| | | LTSLVKRISEFDLGNIYVNQEELSNISLKLFDNWNSINGLLFKHAENRI |
| | | GSAEKSANKKKIDAWMKNKEFSIATLNLAIAESNSEEISRVKIESYWN |
| | | NFEAKVQSILCGDNRRNLDEFISATFNENNALREDSKIIEKLKAFLDAL |
| | | lEIMHSIKPLISDAENRDLSFYNELIPLYDQLSLVVPLYNKIRNYATQKL |
| | | TESEKFKLNFDNPTLADGWDQNKEEANTAILLLKNGLYYLGIMNAK |
| | | NKPKIKDFKTSESEDCYDKMVYKLLPGPNKMLPKVFFSEKGLATFKP |
| | | PKDILDGYNAGKHKKGDLFDIGFCHQLIDFFKESIAKHPDWKKFDFN |
| | | FSDTSSYEDISGFYKEVTDQGYKITFSKIPTSQIDEWVKEGKLFLFQIY |
| | | NKDFAPGAKGSPNLHTLYWKSVFSPENLKDVVVKLNGEAELFYRPS |
| | | SVKKPYSHKVGEKLVNRIGKDGLPLPESVFGELFRYFNGKLEGELSDE |
| | | AKRYLDVAVVKDVKHEIVKDRRYTQDKFEFHVPLTLNFKADSKNEY |
| | | MNERVRHFLKDNPDVNIIGIDRGERHLLYMTLINQKGEILKQKSFNV |
| | | VESVNYQAKLVQREKERDAARRSWSSVGKIKDLKEGFLSQVIHEITT |
| | | TMIENNAIVVLEDLNFGFKRGRFCVERQVYQKFEKMLIDKLNYLVFK |
| | | NKPEGDVGGVLKGYQLAEKFDSFQKLGKQSGFLFYIPAAYTSKIDPT |
| | | TGFANLFNMTELTSAEKKKEFLSHFEDITYDGKNDRFLFSFDYKNFKC |
| | | FQTDYIKKWTVYSQGKRIVYDKESKSAKEISPVEIIKAALAKQNIALTD |
| | | QLDVLSAINSVEASPKSASFFGDICYAFEKTLQMRNSIPNTDEDYLAS |
| | | PVMNKRGEFYDSRSCDDALPQNADANGAYHIALKGLYLIKNVFDA |
| | | GGKELKISHEDWFKFAQSRNC |
| 75 | Cas12 | MSKGKIWENFINQYSVSKTLRFELKPVGKTLENINAKGLIEEDEQRAE |
| | | DYKKAKKIIDEYHKYFIEGALGSCSLDLNILNEFLQLYNKAQKTDADKK |
| | | EYEKIQTTLRKNIAESFGKNADKKTKEQYENLFKKELLRNDLPDWVE |
| | | DEEDAKIIERFKTFTTYFTGFHENRKNIYDNEEKSTAIGYRIVHENLPK |
| | | FIDNMNAFEKISKALDLSEIDRDFQSELGEIKAEEFFTIEFFNQCLNQF |
| | | GIDRYNTLLGGISEGENIKKKQGLNERINLYNQQLKGERKKERLPKLK |
| | | VLYKQILSDSSSHSFSIDEFENDNELLESLEIFYKNELIGFNHSGVDSNI |
| | | FDLVKDLLLKIDESEQSSIYLKNDKGLTEISQRIFGDWNIIKSALEEYYD |
| | | EHYPPKKDTFNKKELDERSRWLKENHSIGVIEKALANYENEIVREHLK |
| | | QNSAPIVSYFKSLEVDGENLIDKIYSAYGNISDLLNSSYPDEKKLVSDR |
| | | TSKDKIKVFLDSLMSLLHFLKPLDVKDLGNKDSAFYGDYDFIVEQLSK |
| | | LVRLYNKTRNYLTRKPYSIEKIKLNFENSTLLAGWDVNKERDNNCVIF |
| | | KRQDGDRELFYLGIMDKSHNKIFTKIEEAKSDDVYQKMNYKLLPGP |
| | | NKMLPKVFFSKKSIDFYAPGEELLKNYKNGTHKKGENFNLQHCHELI |
| | | DFFKRSINKHEDWSQFNFKFSDTSEYEDTSFFFKEVSQQGYSITFKNI |
| | | DRETIEKFVDEGKLYLFQIYNKDFSPKSKGRPNLHTLYWKMLFDERN |
| | | LANTVYQLNGEAEVFYRKKSISEKDRVVHRADEPIGLKNSENSAQKS |
| | | LFPYDIVKDRRFTVDKFQFHVPITLNFKSEGNERLNISVNKFLKDNPD |
| | | VNIIGLDRGERHLIYLTLINQKGEILHQESLNEVMGVNYQQKLHRVE |
| | | KDRTEERRNWDRIENIKELKSGYLSQVVHKISQLMVEYNAIVVMEDL |
| | | NFGFKRGRIKVEKQVYQKFEKTLIDKLNYLVFKDREPEEPAGVLNAL |
| | | QLTNKFESFKKLGKQCGFLFYVTSDYTSKIDPATGFVNLLYPKYESVEK |
| | | SQNFFRKFDNICFNSGAGYFEFDFDYSNFTDRADGTRTRWKVCTVG |
| | | NERFGYNPKTKASETVNVTESLKELLLQHEIAFENGESLVESISKNTTK |
| | | YFHKSLLNFLRLTLTLRHSKTGTDIDYILSPVANEEGVFFDSRNASDK |
| | | MPKDADANGAYNVALKGLMVLERINAAEDLSQFKFKDMSIKNKD |
| | | WLKFVQDRQG |
| 76 | Cas12 | MKNLANFTNLYSLQKTLRFELKPIGKTLDWIIKKDLLKQDEILAEDYKI |
| | | VKKIIDRYHKDFIDLAFESAYLQKKSSDSFTAIMEASIQSYSELYFIKEKS |
| | | DRDKKAMEEISGIMRKEIVECFTGKYSEVVKKKFGNLFKKELIKEDLL |
| | | NFCEPDELPIIQKFADFTTYFTGFHENRENMYSNEEKATAIANRLIRE |
| | | NLPRYLDNLRIIRSIQGRYKDFGWKDLESNLKRIDKNLQYSDFLTENG |
| | | FVYTFSQKGIDRYNLILGGQSVESGEKIQGLNELINLYRQKNQLDRR |
| | | QLPNLKELYKQILSDRTRHSFVPEKFSSDKALLRSLLDFHKEVIQNKNL |
| | | FEEKQVSLLQAIRETLTDLKSFDLDRIYLTNDTSLTQISNFVFGDWSKV |
| | | KTILAIYFDENIANPKDRQRQSNSYLKAKENWLKKNYYSIHELNEAIS |
| | | VYGKHSDEELPNTKIEDYFSGLQTKDETKKPIDVLDAIVSKYADLESLL |
| | | TKEYPEDKNLKSDKGSIEKIKNYLDSIKLLQNFLKPLKPKKVQDEKDLG |
| | | FYNDLELYLESLESANSLYNKVRNYLTGKEYSDEKIKLNFKNSTLLDG |
| | | WDENKETSNLSVIFRDTNNYYLGILDKQNNRIFESIPEIQSGEETIOK |
| | | MVYKLLPGANNMLPKVFFSEKGLLKFNPSDEITSLYSEGRFKKGDKF |
| | | SINSLHTLIDFYKKSLAVHEDWSVFNFKFDETSHYEDISQFYRQVESQ |
| | | GYKITFKPISKKYIDTLVEDGKLYLFQIYNKDFSQNKKGGGKPNLHTIY |
| | | FKSLFEKENLKDVIVKLNGQAEVFFRKKSIHYDENITRYGHHSELLKG |
| | | RFSYPILKDKRFTEDKFQFHFPITLNFKSGEIKQFNARVNSYLKHNKD |
| | | VKIIGIDRGERHLLYLSLIDQDGKILRQESLNLIKNDQNFKAINYQEKL |
| | | HKKEIERDQARKSWGSIENIKELKEGYLSQVVHTISKLMVEHNAIVVL |
| | | EDLNFGFKRGRQKVERQVYQKFEKMLIEKLNFLVFKDKEMDEPGGI |
| | | LKAYQLTDNFVSFEKMGKQTGFVFYVPAWNTSKIDPKTGFVNFLHL |
| | | NYENVNQAKELIGKFDQIRYNQDRDWFEFQVTTDQFFTKENAPDT |
| | | RTWIICSTPTKRFYSKRTVNGSVSTIEIDVNQKLKELFNDCNYQDGED |
| | | LVDRILEKDSKDFFSKLIAYLRILTSLRQNNGEQGFEERDFILSPVVGS |
| | | DGKFFNSLDASSQEPKDADANGAYHIALKGLMNLHVINETDDESLG |
| | | KPSWKISNKDWLNFVWQRPSLKA |
| 77 | Cas12 | MNLIENETKSEEIKSKLDSIMEIMHWTKMFIIEEEIEKDVNFYNEIEEI |
| | | YDELQPLVTIYNRIRNYVTQKPYSEEKIKLNFGIPTLANGWSKTKEYD |
| | | NNAIIMIRDGKYYLGIFNAKNKPDKKIMEGHQSEENGDYKKMIYRLL |
| | | PGPNKMLPKVFMSKTGIAEYKPSQYILECYEQNKHIKSDKNFDIKFCR |
| | | DLIDFFKTSINRHPEWSKFNFKFSETSEYEDISTFYREVEKQGYKIEWT |
| | | YISEKEIKELDENGQLYLFQIYNKDFSEKSKGKENLHTMYLKNLFSEEN |
| | | LKNIVLKLNGEAEVFFRKSSIKKPIIHKKGSVLVNKTYNENGERKSIPEE |
| | | QYTEIYKYLNSIGTNELSEKSKKLMEEGKVEYYKANYDIVKDYRYSVD |
| | | KFFIHLPMTINFKAAGFSPINNIALKSIALKEDMHIIGIDRGERNLIYVS |
| | | VIDTKGNIVEQRNFNIVNGIDYKEKLKQKELDRDNARKNWKEIGKIK |
| | | DLKEGYLSLVVHEIAKLVVKYNAIITMEDLNQGFKRGRFKVERQVYQ |
| | | KFETMLINKLNYLVDKDLAVDQEGGLLRGYQLTYIPESLKVLGRQCG |
| | | YIFYVPVAYTSKIDPTTGFVAIFNYKGMTDKDFVTSFDSIKYDDERGLF |
| | | AFEFDYENFVTHKVEMARNKWTVYTYGERIKRKFKNGLWDTAEKV |
| | | DLTYQMRSILEKYEIEYNKGQDILEQIEELDEKAQNGICKEIKYLVKDI |
| | | VQMRNSLPDNAVEDYDAIISPVINNNGEFFDSTRGDEDKPLDADAN |
| | | GAYCIALKGLYEVMQIKKNWNEETEFPRKELKIRHQDWFDFIQNKR |
| | | YL |
| 78 | Cas12 | MENRYQVLQGLTAAQKKAAAAAKKRSSFSIVELNAATRSRVPDEKY |
| | | VPVQNYFSAMGKVCSQGEPKRENFVTRICAAYQELEEYIPSIRKSLLO |
| | | EKRATELIKNYLDAVNDLLRFIKPLLGRGNETDKDANFYGEFSFLTDC |
| | | LFAIVPLYNEVRNYLTQKPYSTEKFKLNFRGSTLLNGWDKNKERDNL |
| | | GVILRKEGKYFLAIMNKKHNTLFTEGKLQQHTGGECYQKMEYKLIPG |
| | | SKMLPKVFFSKKGISTFQPSEELLLNYRIGTYKKGEKFNLEHLHKLIDFY |
| | | KHSIAVHEDWSKFDFHFSDTSSYRDISGFYKEVEQQGYKLTFRNVSV |
| | | SYINRLVEEGKLYLFQIYNKDFSEYSKGTPNLHTLYWKMLFDPENLKD |
| | | VVYKLSGEAEVFFRKKSLDVSHPTHPKNEPIEKKNINNKGEKSLFSYD |
| | | LIKDRRFTVDKFQFHVPITMNFKGEQGDRVNQMVQSYVRNNKGL |
| | | NVIGIDRGERNLLYLVVINEHGEILEQFSLNEIRNAYNGKEHKIDYHTL |
| | | LEERSKKRQDARQSWQTIEGIKDLKTGYLSQVIHVITQLMVKYNAIV |
| | | VLEDLNFGFKSSRQKFEQSVYQQFERKLIDKLNFLVNKKAAPNEVGG |
| | | LLNAYQLTAPLGNSRKMGKQNGFLFYVPAWHTSKIDPRTGFVNLLD |
| | | TRYENVAKAKEFFAKFASITYNPEKKWFEFAFDYKAFGNRADGSRTK |
| | | WTICSYGERIETFRNPENNNQWDTKSVPLTERLTELFSKYGIDYTTNL |
| | | KEQILNQTDKAFFVELLGALRLTLQLRNSRKSTGEDFLFSPVADENGC |
| | | FFDSREANDNEPKDADANGAYHIALKGLWVLDTIRNTEEGKNPKLA |
| | | ITNKEWLSFAQAKPFAHE |
| 79 | Cas12 | MSDSYDELTKAQKEKQEKRKHVALTEVVAALEKYTIALDNGHEHKN |
| | | AVNTFKNYFQNYFFHFDTDKKKTAKTLDCQIKDEYNGLKGILNTPW |
| | | DKNKKLQQDKKLVQQIKSFLDSIQELLWFIKPLVLTDNTLEKDERFYG |
| | | EFMPLYDEISNIIKLYNKIRNYLTKKPYSIEKYKLNFENGSLLSGWDVN |
| | | KEKDNTSVLLCKDNQYYLAIMHIDHNKVFELDELIKHAGKGYQKINY |
| | | KLLPGANKMLPKVFFSGKNISYYDPSKEILKIRNYGTHTKNGDPQPG |
| | | FSKRDFSVDDCRKMIDFFKNSIAKHEDWKNFDFKFQPTKNYNSIDEF |
| | | YREVEEQGYKITYSNVSEDYIDSLVEYGKIYLFHIYNKDFSDKRDESKK |
| | | HTDNMHTLYWKALFDAKNLKDVVYKLNGEAEIFYRKKSIDIKKPTHE |
| | | KGKPIDNKNPNARKKTSVFKYDLIKDKRFTVDKFFFHVPITLNFKSKS |
| | | GYLSNDDVNAAIKKNNDIKIIGLDRGERNLIYLSLINSKGEIAYQESLN |
| | | VVSTDKGFDVNYHKLLDDKEGNRDEARKNWDKIENIKELKAGYLSQ |
| | | VIHKIAKLMIDNNAIVVMEDLNFGFKRGRFKVEKQIYQKFEKMLIDK |
| | | LNYLVFKNVHPEQAGGLYKAYQLTAQFESFKKLGKQSGFLFYIPAW |
| | | NTSKIDPTAGFVDFLKPRYESVTQAKSFLQRFDKINYNKTKDYFEFAF |
| | | DYKNFTDKANDTKTDWVVCTYGTERYYYDVRTKTTQKIDITAELKKL |
| | | LEKSEINYLNGKDIKELIIAVDSKEFHSALLKYLAIVLALRYSDSQSGRD |
| | | FILSPVANEQGHFFNSDKTDDTLPKDADANGAYHIALKGLWAINQI |
| | | RKTKNGDKLKLTISNKDWLNFVQKKEYRKGV |
| 80 | Cas12 | MQTLFENFTNQYPVSKTLRFELIPQGKTKDFIEOKGLLKKDEDRAEK |
| | | YKKVKNIIDEYHKDFIEKSLNGLKLDGLEKYKTLYLKQEKDDKDKKAFD |
| | | KEKENLRKQIANAFRNNEKFKTLFAKELIKNDLMSFACEEDKKNVKE |
| | | FEAFTTYFTGFHQNRANMYVADEKRTAIASRLIHENLPKFIDNIKIFEK |
| | | MKKEAPELLSPFNQTLKDMKDVIKGTTLEEIFSLDYFNKTLTQSGIDIY |
| | | NSVIGGRTPEEGKTKIKGLNEYINTDFNQKQTDKKKRQPKFKQLYKQ |
| | | ILSDRQSLSFIAEAFKNDAEILEAIEKFYVNELLHFSNEGKSTNVLDAIK |
| | | NAVSNLESFNLTKMYFRSGTSLTDVSRKVFGEWSIINRALDNYYATT |
| | | YPIKPREKSEKYEERKEKWLKQDFNVRLIQTAIDEYDNETVKGKNSG |
| | | KVIADYFAKFCDDKETDLIQKVNEGYIAVKDLLNTPYPENEKIGSNKD |
| | | QVKQIKAFMDSIMDIMHFVRPLSLKDTDKEKDETFYSLFTPLYDHLT |
| | | QTIALYNKVRNYLTQKPYSTEKIKLNFENSTLLGGWDLNKETDNTAII |
| | | LRKDNLYYLGIMDKRHNRIFRNVPKADKKDFCYEKMVYKLLPGANK |
| | | MLPKVFFSQSRIQEFTPSAKLLENYANETHKKGDNFNLNHCHKLIDF |
| | | FKDSINKHEDWKNFDFRFSATSTYADLSGFYHEVEHQGYKISFQSIA |
| | | DSFIDDLVNEGKLYLFQIYNKDFSPFSKGKPNLHTLYWKMLFDENNL |
| | | KDVVYKLNGEAEVFYRKKSIAEKNTTIHKANESIINKNPDNPKATSTF |
| | | NYDIVKDKRYTIDKFQFHIPITMNFKAEGIFNMNQRVNQFLKANPDI |
| | | NIIGIDRGERHLLYYALINQKGKILKQDTLNVIANEKQKVDYHNLLDK |
| | | KEGDRATARQEWGVIETIKELKEGYLSQVIHKLTDLMIENNAIIVME |
| | | DLNFGFKRGRQKVEKQVYQKFEKMLIDKLNYLVDKNKKANELGGLL |
| | | NAFQLANKFESFQKMGKQNGFIFYVPAWNTSKTDPATGFIDFLKPR |
| | | YENLNQAKDFFEKFDSIRLNSKADYFEFAFNFKNFTEKADGGRTKWT |
| | | VCTTNEDRYAWNRALNNNRGSQEKYDITAELKSLFDGKVDYKSGK |
| | | DLKQQIASQESADFFKALMKNLSITLSLRHNNGEKGDNEQDYILSPV |
| | | ADSKGRFFDSRKADDDMPKNADANGAYHIALKGLWCLEQISKTDD |
| | | LKKVKLAISNKEWLEFVQTLKG |
| 81 | Cas12 | MQLTDNLSDKYKEAAPLLNENYSNEKGLKNDDKSISLIKNFLDAIKEI |
| | | EKFIKPLSETNITGEKNDLFYSQFTPLLDNISRIDILYDKVRNYVTQKPF |
| | | STDKIKLNFGNSQLLNGWDRNKEKDCGAVWLCKDEKYYLAIIDKSN |
| | | NSILENIDFQDCDESDCYEKIIYKLLPGPNKMLPKVFFSEKCKKLLSPS |
| | | DEILKIRKNGTFKKGDKFSLDDCHKLIDFYKESFKKYPNWLIYNFKFKK |
| | | TNEYNDIREFYNDVASQGYNISKMKIPTSFIDKLVDEGKIYLFQLYNK |
| | | DFSPHSKGTPNLHTLYFKMLFDERNLEDVVYKLNGEAEMFYRPASIK |
| | | YDKPTHPKNTPIKNKNTLNDKKTSAFPYDLIKDKRYTKWQFSLHFPIT |
| | | MNFKAPDRAMINDDVRNLLKSCNNNFIIGIDRGERNLLYVSVIDSN |
| | | GTIIYQHSLNIIGNKFKGKTYKTNYREKLATREKDRTEQRRNWKAIESI |
| | | KELKEGYISQAVHVICQLVVKYDAIIVMEKLTEGFKRGRTKFEKQVYQ |
| | | KFEKMLIDKLNYYVDKKLDPDEEGGLLHAYQLTNKLESFDKLGTQSG |
| | | FIFYVRPDFTSKIDPVTGFVNLLYPRYENIDKAKDMISRFDEIRYNAGE |
| | | DFFEFDIDYDKFPKTASDYRKKWTICTNGERIEAFRNPANNNEWSY |
| | | RTIILAEKFKELFDNNSINYRDSDDLKAEILSQTKGKFFEDFFKLLRLTL |
| | | QMRNSNPETGEDRILSPVKDKNGNFYDSSKYDEKSKLPCDADANG |
| | | AYNIARKGLWIVEQFKKADNVSTVEPVIHNDKWLKFVQENDMTNN |
| 82 | Cas12 | MLPNEKERNEFKNSNAKQYIREISNIITDTETAHLEYDEHISLIESEEKA |
| | | DEMKKRLDMYMNMYHWAKAFIVDEVLDRDEMFYSDIDDIYNILE |
| | | NIVPLYNRVRNYVTQKPYNSKKIKLNFQSPTLANGWSQSKEFDNNA |
| | | IILIRDNKYYLAIFNAKNKPDKKIIQGNSDKKNDNDYKKMVYNLLPGA |
| | | NKMLPKVFLSKKGIETFKPSDYIISGYNAHKHIKTSENFDISFCRDLIDY |
| | | FKNSIEKHAEWRKYEFKFSATDSYNDISEFYREVEMQGYRIDWTYISE |
| | | ADINKLDEEGKIYLFQIYNKDFAENSTGKENLHTMYFKNIFSEENLKDI |
| | | IIKLNGQAELFYRRASVKNPVKHKKDSVLVNKTYKNQLDNGDVVRIP |
| | | IPDDIYNEIYKMYNGYIKENDLSEAAKEYLDKVEVRTAQKDIVKDYRY |
| | | TVDKYFIHTPITINYKVTARNNVNDMAVKYIAQNDDIHVIGIDRGER |
| | | NLIYISVIDSHGNIVKQKSYNILNNYDYKKKLVEKEKTREYARKNWKSI |
| | | GNIKELKEGYISGVVHEIAMLMVEYNAIIAMEDLNYGFKRGRFKVER |
| | | QVYQKFESMLINKLNYFASKGKSVDEPGGLLKGYQLTYVPDNIKNLG |
| | | KQCGVIFYVPAAFTSKIDPSTGFISAFNFKSISTNASRKQFFMQFDEIR |
| | | YCAEKDMFSFGFDYNNFDTYNITMSKTQWTVYTNGERLQSEFNNA |
| | | RRTGKTKSINLTETIKLLLEDNEINYADGHDVRIDMEKMDEDKNSEF |
| | | FAQLLSLYKLTVQMRNSYTEAEEQEKGISYDKIISPVINDEGEFFDSD |
| | | NYKESDDKECKMPKDADANGAYCIALKGLYEVLKIKSEWTEDGFDR |
| | | NCLKLPHAEWLDFIQNKRYE |
| 83 | Cas12 | MSNLYSNLHNLYPVQKTLRFELKPQGKTKENMEKAGILKADEHRAE |
| | | VYGKVKKYCDEYHKTFIDRCLSNIELNEIDKYYELYSINNRDDKQKEEL |
| | | DQLETGLRKQISDAFKKSAEYKGLFQKDMITSYLVTMYKENQEKMQ |
| | | DIGEFNRFTTYFTGYNKNRENMYSEEDKSTAISYRLINENLPTFIDNIK |
| | | IYKKIVSLMPENIEKIYKDLEEYIQVNSVDEIFNISYYNDVLTQRGIECY |
| | | NILISGRTKNDGDKIKGLNEYINEFNQTHNEKIPKLQELYKQILSDAES |
| | | ASFKVDIIENDKELLNLIEVYYANILPTLNKIEDLFTRISNYNLELILVNN |
| | | DGSLSTLSNMVFNEWSYIKGIISQKYDAEYSGKEKYGTEKYAQKKQE |
| | | YLKKQKIYSLKFLNDCIGNNAICEYLKNYIIQNKNIETIKEDYNEVQNIK |
| | | AEDDTKELIKDEKSIEKIKKFLDDVKSLQEFVKLVIPKDRTVEKDAKFYS |
| | | ELTPYYEKIKEIIPLYNKVRNYVTQKPYSTEKIKLNFECPTLLNGWDAN |
| | | KEEANLGVILLKEGKYYLGIMNPYCKKIFEVYEKDSNEQNNYKKMEY |
| | | KLLPGPNKMLPKVFFSNSRIEEFNPSKELQEKYNKGYHKKGKDFDIN |
| | | FCHELIDFYKQSLNKHEDWKKFNFKFKDTSEYNDISEFYREVEEQGY |
| | | KIEYTEYSEKYINELVDRGELYLFQIYNKDFSEYSKGKENLHTLYWKAV |
| | | FDPDNIMNPVYKLNGNAEIFYRKKSLEMKVTHPANQPIANKNISTIE |
| | | AGRSTSTFKYDLIKDKRYTMDKFQFHVPITVNFKSERLFNINQIVNKY |
| | | LKYNDDIHVIGIDRGERNLLYVCVIDKNEKIVYQKSLNEIVSEYNNNR |
| | | YTTDYHGLLDRKEKEREIAREDWKNIENIKELKEGYMSQIIHILVELM |
| | | KKYNAIIVIEDLNKGFKNSRIKVEKQVYQKFEKMFIDKLNYLVFKDED |
| | | KMDEGGVLNAYQLTNKFESFTKLGKQSGILYYIPAWCTSKIDPTTGFI |
| | | NRFYLKYENFDKSKEFVNRIDDIRYNEKENLFEFDIDYSKFTDRLNDTK |
| | | NKWTLCSYGERILTQKNANGEWFDRRIQLSIEFKNLFEKYVINLNNIK |
| | | DSILKLDKDNIEFYKGNGENLGFIQLFKLMVQMRNSLTGKEEDNLIS |
| | | PVKNQHGKFFNTSERVEGLPIDADANGAYNIARKGFMLVEQMKNV |
| | | EDEKLNKIKYNITEKEWLNYVQNRGMWWKRQYLYHI |
| 84 | Cas12 | MAKNTIFSQFTGLYPVSKTLRFELKPMGKTLEKIKETGVIENDKKRHN |
| | | DYFDAKKIIDKYHKYFIDAALSKFPRIDWSPLKEAIERSLDRSDASKKKL |
| | | EKTQTEFRKKIAKALTTHDHYKELTASTPKDLFLKVFPDHFGKQPAID |
| | | TFDGFSSYFTGFQENRQNIYSDEAISTAIPYRLVHDNFPKFLSNIEVYK |
| | | TLKDNAPSVLSDAENELRDFLNGKSLANIFELNAYNEVLTQSGIDFFN |
| | | QVIGGISDEGGEKKTRGINEFSNLYRQQHPEFAQKRLATKMIPLYKQ |
| | | ILSDRETKSFILESYSNDSQVQNSVKEFFESQILNWDIAGRRVNVLNE |
| | | LTSLVKRISEFDLGNIYVNQEELSNISLKLFDNWNSINGLLFKHAENRI |
| | | GSAEKSANKKKIDAWMKNKEFSIATLNLAIAESNSEEISRVKIESYWN |
| | | NFEAKVQSILCGDNRRNLDEFISATFNENNALREDSKIIEKLKAFLDAL |
| | | lEIMHSIKPLISDAENRDLSFYNELIPLYDQLSLVVPLYNKIRNYATQKL |
| | | TESEKFKLNFDNPTLADGWDQNKEEANTAILLLKNGLYYLGIMNAK |
| | | NKPKIKDFKTSESEDCYDKMVYKLLPGPNKMLPKVFFSEKGLATFKP |
| | | PKDILDGYNAGKHKKGDLFDIGFCHQLIDFFKESIAKHPDWKKFDFN |
| | | FSDTSSYEDISGFYKEVTDQGYKITFSKIPTSQIDEWVKEGKLFLFQIY |
| | | NKDFAPGAKGSPNLHTLYWKSVFSPENLKDVVVKLNGEAELFYRPS |
| | | SVKKPYSHKVGEKLVNRIGKDGLPLPESVFGELFRYFNGKLEGELSDE |
| | | AKRYLDVAVVKDVKHEIVKDRRYTQDKFEFHVPLTLNFKADSKNEY |
| | | MNERVRHFLKDNPDVNIIGIDRGERHLLYMTLINQKGEILKQKSFNV |
| | | VESVNYQAKLVQREKERDAARRSWSSVGKIKDLKEGFLSQVIHEITT |
| | | TMIENNAIVVLEDLNFGFKRGRFCVERQVYQKFEKMLIDKLNYLVFK |
| | | NKPEGDVGGVLKGYQLAEKFDSFQKLGKQSGFLFYIPAAYTSKIDPT |
| | | TGFANLFNMTELTSAEKKKEFLSHFEDITYDGKNDRFLFSFDYKNFKC |
| | | FQTDYIKKWTVYSQGKRIVYDKESKSAKEISPVEIIKAALAKQNIALTD |
| | | QLDVLSAINSVEASPKSASFFGDICYAFEKTLQMRNSIPNTDEDYLAS |
| | | PVMNKRGEFYDSRSCDDALPQNADANGAYHIALKGLYLIKNVFDA |
| | | GGKELKISHEDWFKFAQSRNC |
| 85 | Cas12 | MYKDKTDKTKIIDSDLIKFINIAESTQLDSMSQDEAKELVKEFWGFTT |
| | | YFVGFYDNRKNMYTAEEKSTGIAYRLVNENLPKFIDNMEAFKKAIAR |
| | | PEIQANMEELYSDFSEYLNVESVQEMFQLDYYNMLLTQKQIDVYNA |
| | | IIGGKTDDEHDVKIKGINEYINLYNQQHKDDKLPKLKALFKQILSDRN |
| | | AISWLPEEFNGDQEVLNAIKDCYERLSENVLGDKVLKSLLGSLSDYSL |
| | | DGIFIRNDLQLTDISQKMFGNWCVIQNAIMQNIKHVAPARKHKESE |
| | | EDYEKRIAGIFKKVDSFSISFINDCLNEADPNNAYFVENYFATFGAVN |
| | | TPTMQRENLFALVQNAYTEVAALLHSDYPTAKHLAQDKVNVAKIKA |
| | | LLDAIKSLQHFVKPLLGKGDESDKDERFYGELASLWAELDTVTPLYN |
| | | MIRNYMTRKPYSQKKIKLNFENPQLLGGWDANKEKDYATIILRRDG |
| | | LYYLAIMNKESKKLLGKAMPSDGECYEKMVYKLLPGANKMLPKVFF |
| | | AKSRMEDFKPSKELVEKYNNGTHKKGKNFNIQDCHNLIDYFKQSISK |
| | | HEDWGKFGFNFSDTSTYEDLSGFYREVEQQGYKLSFARVSVSYISQL |
| | | VEEGKMYLFQIYNKDFSEYSKGTPNMHTLYWKALFDERNLADVVYK |
| | | LNGQAEMFYRKKSIENTHPTHPANHPILNKNKDNKKKESLFDYDLIK |
| | | DRRYTVDKFMFHVPITMNFKSSGSENINQDVKAYLRHADDMHIIGI |
| | | DRGERHLLYLVVIDLQGNIKEQYSLNEIVNEYNGNTYHTNYHDLLDV |
| | | CEEERLKARQSWQTIENIKELKEGYLSQVIHKITQLMVKYHAIVVLED |
| | | LNMGFMRGRQKVEKQVYQKFEKMLIDKLNYLVDKKADASVSGGLL |
| | | NAYQLTSKFDSFQKLGKQSGFLFYIPAWNTSKIDPVTGFVNLLDTRY |
| | | QNVEKAKVFFSKFDAIRYNKDKDWFEFNLDYDKFGKKAEGTRTKW |
| | | ALCTRGMRIDTFRNKEKNSQWDNQEVDLTAEMKSLLEHYYIDIHG |
| | | NLKDAISAQTDKAFFTGLLHILKLTLQMRNSITGTETDYLVSPVADEN |
| | | GIFYDSRSCGDELPENADANGAYNIARKGLMMIEQIKDAKDLDNLK |
| | | FDISNKSWLNFAQQKPYKNE |
| 86 | Cas12 | MNEADPNNAYFVENYFATFGAVNTPTMQRENLFALVLNAYTEVAS |
| | | LLHSYYPAEKNLAQDKANVAKIKALLDAIKSLQHFVKPLLGKGDESDK |
| | | DERFYGELASLWAELETVTPLYNMIRNYMTRKPYSQKKIKLNFENPQ |
| | | LLGGWDANKEKDYATIILRRNGLYYLAIMDKDSRKLLGKAMPSDGE |
| | | CYEKMVYKLLPGANKMLPKVFFAKSRMEDFKPSKELVEKYNNGTHK |
| | | KGKNFNIQDCHNLIDYFKQSISKHEDWGKFGFNFSDTSTYEDLSGFY |
| | | REVEQQGYKLSFARVSVSYISQLVEEGKMYLFQIYNKDFSEYSKGTP |
| | | NMHTLYWKALFDERNLADVVYKLNGQAEMFYRKKSIENTHPTHPA |
| | | THPILNKNKDNKKKESLFEYDLIKDRRYTVDKFMFHVPITMNFKSVG |
| | | SENINQGVKEYLHHADDMHIIGIDRGERHLLYLVVIDLQGNIKEQYSL |
| | | NEIVNEYNGNTYHTNYHDLLDAREDERLKARQSWQTIENIKELKEGY |
| | | LSQVIHKITQLMVKYHAIVVLEDLNMGFMRGRQKVEKQVYOKFEK |
| | | MLIDKLNYLVDKKADASVSGGLLNAYQLTSKFDSFQKLGKQSGFLFYI |
| | | PAWNTSKIDPVTGFVNLLDARYQNVEKAKAFFSKFDAIRYNKDKD |
| | | WFEFNLDYDKFGKKAEGTRTKWTLCTRGMRIDTFRNKEKNSQWD |
| | | NQEVDLTAELKSLLEHYYIDIHGNLKEAISTQTDKAFFTGLLHILKLTLO |
| | | MRNSITGTETDYLVSPVADENGIFYDSRTCGDELPENADANGAYNI |
| | | ARKGLMMIEQIKNAEDLGNLKFDISNKAWLNFAQQKPYKNG |
| 87 | Cas12 | MDNNNLHAVDGYFATLGAVNTPTMQRENLFALIQNAYTDISDLLD |
| | | TPYPENKNLAQDKTNVAKVKALLDAIKSLQHFVKPLLGMGDESDKD |
| | | ERFYGELASLWTELDTVTPLYNMIRNYMTRKPYSEKKIKLNFENPQL |
| | | LGGWDANKEKDYATIILRRNGMYYLAIMDKDSKKLLGKTMPSDGE |
| | | CYEKMVYKLLPGANKMLPKVFFAKSRINDFKPSKKIVENYNNGTHKK |
| | | GKNFNINDCHDLIDYFKQSIDKHEDWSKFGFNFSDTSTYEDLSGFYR |
| | | EVEQQGYKLSFTNISVSFIDKLVDEGKMYLFQIYNKDFSDYSKGTPN |
| | | MHTLYWKALFDERNLADVVYKLNGEAEMFYRKKSINNTHPTHHAN |
| | | HPIQNKNKDNKKKESVFEYDLVKDRRYTEDKFLFHVPITMNFNSVG |
| | | AENINQQVRKYLQQADDTHIIGIDRGERHLLYLVVIDMQGNIKEQFS |
| | | LNEIVNEYNGNTYRTNYHDLLDVRADKRLKASQSWQTIENIKELKEG |
| | | YLSQAIHKITQLMVKYHAVVVLEDLNKGFMRGRQKVEKQVYQKFEK |
| | | MLIDKLNYLVDKHKDANETGGLLHALQLTSEFKNFKKSEYQNGFLFY |
| | | IPAWNTSKIDPVTGFVNRFDTRYTNAVEAQKFFRKFDEIRYNEEKD |
| | | WFEFEFDYDKFTQKAHGTRTRWTLCTHGKRLRSFRNPAKQYNWDS |
| | | EVVALTDEFKRILGEAGIDIHENLKDAISNLEGKRRKYLEPLMQFMKL |
| | | LLQLRNSRKNPEEDYILSPVADENGVFYDSRSCGDKLPENADANGA |
| | | YNIARKGLMLIRQIKEAKELGKVKYDISNKAWLNFAQQKPYKNE |
| 88 | Cas12 | MQKKAFEENQQNLRSIIAKKLTEDKAYANLFGKNLLESYKDKTDKTKI |
| | | IDSDLIKFINTAESTQLDSMSQDEAKEIVKEFWGFTTYFVGFFDNRK |
| | | NMYTAEEKSTGIAYRLINENLPKFIDNMEAFKKAIARPEIQADMEELY |
| | | SNFSEYLNVESIQEMFLLDYYNMLLTQKQIDVYNAIIGGKTDDEHDV |
| | | KIKGINEYINLYNQQHKDDKLPKLKALFKQILSDRNAISWLPEEFNSD |
| | | QEVLNAIKDCYERLSENVLGDKVLKSMLGSLADYSLDGIFIRNDLQLT |
| | | DISQKMFGNWSVIQNAIMQNIKHVAPARKHKESEEEYENRIAGIFK |
| | | KADSFSISYIDACLNETDPNNAYFVENYFATLGAVDTPTMQRENLFA |
| | | LVQNAYTEITALLHSDYPTEKNLAQDKANVAKIKALLDAIKSLQHFVK |
| | | PLLGKGDESDKDERFYGELASLWAELDTMTPLYNMIRNYMTRKPYS |
| | | QKKIKLNFENPQLLGGWDANKEKDYATIILRRNGLYYLAIMNKDSKK |
| | | LLGKAMPSDGECYEKMVYKLLPGANKMLPKVFFAKSRMEDFKPSK |
| | | ELVEKYNNGTHKKGKNFNIQDCHNLIDYFKQSIDKHEDWSKFGFKF |
| | | SDTSTYEDLSGFYREVEQQGYKLSFARVSVSYINQLVEEGKMYLFQIY |
| | | NKDFSEYSKGTPNMHTLYWKALFDERNLADVVYKLNGQAEMFYRK |
| | | KSIENTHPTHPANHPILNKNKDNKKKESLFEYDLIKDRRYTVDKFMF |
| | | HVPITMNFKSVGSENINQDVKAYLRHADDMHIIGIDRGERHLLYLVV |
| | | IDLQGNIKEQFSLNEIVNDYNGNTYHTNYHDLLDVREDERLKARQS |
| | | WQTIENIKELKEGYLSQVIHKITQLMVKYHAIVVLEDLNMGFMRGR |
| | | QKVEKQVYQKFEKMLIEKLNYLVDKKADASVSGGLLNAYQLTSKFDS |
| | | FQKLRKQSGFLFYIPAWNTSKIDPITGFVNLLDTRYQNVEKAKAFFSK |
| | | FDAIRYNKDKEWFEFDLDYDKFGRKAEGTRTKWTLCTRGMRIDTFR |
| | | NKEKNSQWDNQEIDLTAEMKSLLEHYYIDIQGNLKEAICTQTDKAFF |
| | | TGLLHILKLTLQMRNSITGTQTDYLVSPVADENGIFYDSRSCGDSLPE |
| | | NADANGAYNIARKGLMLIEKIKNAEDLDTIKFDISNKAWLNFAQQK |
| | | PYKNG |
| 89 | Cas12 | MLENEQEAEKIKNKLDDIMNIYHWIKIFLVDEEIEKDMDFYSEIEDIY |
| | | EELSPLVSLYNRVRNYVTQKPYSQEKMKLNFGSPTLADGWSKSKEFS |
| | | NNAIIMLKDGKYYIGIFNIRNKPNKEVIEGRNNRINDSDYKKMVYRLL |
| | | PGANKMLPKVMFSKKGIEYYNPSQYILSGYNSKKHIKSNENFDINFC |
| | | HDLIDFFKESINKNEEWKNFDFKFSDTESYNDISEFYREVEQQGYKIE |
| | | WVYISEQDIEQLEKNGQLYIFQIYNKDFAKKSIGNKNLHTMYLENLFS |
| | | EENLKDVVLKLNGEAEIFFRKSSIKKPIVHKAGSILVNKCIEDETGNKV |
| | | SFPDDIYNEIYQYMNGMTDVLSERAQNYYEKVKHSVSKQDIVKDYR |
| | | YTVDKYFIHLPITINFKASSFMPINDIALKYIAKRDDIHIIGIDRGERNLI |
| | | YVSVIDLQGNIVYQKNYNVVNGYDYKAKLRETEIQRDNARKNWKEI |
| | | GKIKQLKEGYLSLVVHEIAQLIVKYNAIVVMEDLNMGFKRGRFKVER |
| | | QVYQKFENMLINKLNYLVDKNKKVDEDGGLLRGYQLTYVPGQKEH |
| | | VGKQCGFIFYVPAAYTSKIDPTTGFVSIFNNKVNAKEFVTKFDSIKYN |
| | | KNMKMFELKFDYNNFETYNITLAKSKWTIYTNGIRLKREYNNGRWN |
| | | KITEVDLTKEMANTLKKYDIEFENNEEILKSISQLDEKNQRNICNEIKEI |
| | | IKLIVQLRNSMPDNGSKDNEYDKIISPVLNENNYFYDSSEVCDNSAP |
| | | ENADANGAYCIAMKGLYQVIQIKENWSQDSNPKNILGIKHYEWFD |
| | | FMQNKRYL |
| 90 | Cas12 | MAKNTIFTQFTGLYPVSKTLRFELKPMGKTLEKIKETGVIENDKKRHN |
| | | DYFDAKKIIDKYHKYFIDAALSKFSRIDWNPLKEAIEGSLDRSDASKKK |
| | | LEKTQTEFRKKIAKALTTHDHYKELTASTPKDLFLKVFPDHFGKQPAI |
| | | DTFDGFSSYFTGFQENRQNIYSDEAISTAIPYRLVHDNFPKFLSNIEVY |
| | | KTLKDNAPSVLSDAENELKDFLNGKPLANIFELNAYNDVLTQSGIDFF |
| | | NQVIGGISGEGGEKKTRGINEFSNLYRQQHPEFAQKRLATKMIPLYK |
| | | QILSDRETKSFILESYSTDSQVQESVKEFFESQILNCDIAGRKVNVLNE |
| | | LTSLIKRIAEFDLGSIYINQEELSNISLELFKSWNTINAVLFKNAENRIGS |
| | | AEKAANKKKIDAWMKSNEFSIATLNLAIAESDSEEISRVKIESYWNDF |
| | | EAKVQSILCGDNRRNLDEFLSATFNENNALREDSEIIGKLKAFLDALIE |
| | | IMHSIKPLISDAENRDLSFYNELMPLYDQLSLVVPLYNKIRNYATQKL |
| | | TESEKFKLNFDNPTLADGWDQNKEDANTAILLLKNGLYYLGIMNAK |
| | | NKPKIKDFKTSESEDCYDKMVYKLLPGPNKMLPKVFFSEKGLATFKP |
| | | PKDILDGYNAGKHKKGDLFDIGFCHQLIDFFKESIAKHPDWKKFDFK |
| | | FSDTSSYEDISGFYKEVTDQGYKITFSKIPTSQIDEWVNEGKLFLFQIY |
| | | NKDFAPGAKGSPNLHTLYWKSVFSPENLKDVVVKLNGEAELFYRPS |
| | | SVKKPYSHKVGEKLVNRIGKDGLPLPESVFGELFRYFNGKLDGELSDE |
| | | AKRYLDVAVVKDVKHEIVKDRRYTQDKFEFHVPLTLNFKADSKNEY |
| | | MNERVRHFLKDNPDVNIIGIDRGERHLLYMTLINQKGEILKQKSFNI |
| | | VESVNYQAKLVQREKERDAARKSWSSVGKIKDLKEGFLSQVIHEITT |
| | | TMIENNAIVVLEDLNFGFKRGRFCVERQVYQKFEKMLIDKLNYLVFK |
| | | NKPEGDVGGVLKGYQLAEKFDSFQKLGKQSGFLFYIPAAYTSKIDPT |
| | | TGFANLFNMTELTSAEKKKDFLSHFDDITYDGKNDRFLFGFDYKNFK |
| | | CFQTDFIKKWTVYTQGKRIVYDKESKSAKEIFPVEIIKAALAKQNIALT |
| | | DQLDVLSAINSVEASPKSASFFGNICYAFEKTLQMRNSIPNTDEDYLV |
| | | SPVMNKRGEFYDSRSCDDALPQNADANGAYHIALKGLYLIKNVFDA |
| | | GGKDLKISHEDWFKFAQSRNC |
| 91 | Cas12 | MRPVLQLTDTEDKLSQNKPAVGKIKALLDAFKDLQHFIKPLLGSGEE |
| | | NEKDELFYGAFQLIWDELDTVTPLYNKVRNWLTRKPYSTEKIKLNFD |
| | | NAQLLGGWDVNKEPDCTGVLLRKDGFYYLGIMNKKSNRIFDADVT |
| | | PADGICYEKIDYKLLPGANKMLPKVFFSKSRIDEFAPSEAILSSYKRGT |
| | | HKKGADFSLSDCHRLIDFFKASINKHEDWSKFGFQFSDTKTYEDISGF |
| | | YREVEQQGYMLSSHQVSEAYINQMVEEGKLFLFRIWNKDFSEYSKG |
| | | TPNMHTLYWRMLFDERNLADVVYKLNGQAEVFYRKASIKAENQIM |
| | | HPAHHPIENKNTLNEKRSSTFDYDLVKDRRYTVDKFQFHVPITINFKA |
| | | IGQ.TNVNPIVHETIRRGGFTHVIGIDRGERHLLYLSLIDLKGHIVKQM |
| | | TLNEIINEYNGLAHKTNYYDLLVKREGERTTARRSWDTIENIKELKEG |
| | | YLSQVIHIISKMMVEYNAIVVLEDLNMGFMRGRQKIERQVYEKFEK |
| | | MLIDKLNCYIDKQADSQSEGGLLHPIQLANKFESFRKLGKQSGCLFYI |
| | | PAWNTSKIDPVTGFVNLFDTRYETREKAKLFFSHFQRICFNAEKDWF |
| | | EFSFDYNDFTTKAEGTRTQWTLCSYGTRIRNFRNPLQNHQWDDEEI |
| | | VLTEAFKALFDKYDIDIHANLKEAINAQTDAQFFKDLMGLMKLLLQ |
| | | MRNSKTNSEVDYLLSPVADEHGRFFDSRAGAGSLPDNADANGAYN |
| | | IARKGLWVIRKIQETPEGEKLSLAITNKEWLEFAQTKPYLND |
| 92 | Cas12 | MNLNTYFSQFTGLYPVSKTLRFELKPMGKTLEKIKETGIIENDKKRHN |
| | | DYFDAKKIIDKYHKYFIDAALSKFPCIDWNPLKEAIERSLDRSDASKKK |
| | | LEKTQTEFRKKIAKALTTHGHYKELTASTPKDLFLKVFPDHFGKQPAI |
| | | DTFDGFSSYFTGFQENRQNIYSDEAISTAIPYRLVHDNFPKFLSNIEVY |
| | | NILKDNAPSVLSDAENELKDFLNGKPLANIFELNAYNDVLTQSGIDFF |
| | | NQVIGGFSGEGGEKKTRGINEFSNLYRQQHPEFAQKRLATKMIPLYK |
| | | QILSDRETKSFILESYSTDSQVQESVKEFFESQILNCDIAGRKVNVLKEL |
| | | SSLIKRITEFDLGSIYVNQEELSSISLELFKSWNTINAILFKNAENRIGSA |
| | | EKAANKKKIDAWMKSNEFSIATLNLAIAESDSEEISRVKIESYWNNFE |
| | | AKVQSILCGDNRRNLDEFISATFNENNALREDSKVIEKLKAFLDALIEI |
| | | MHSIKPLISDAENRDLSFYNELMPLYDQLSLVVPLYNKIRNYATQKLT |
| | | ESEKFKLNFDNPTLADGWDQNKEEANTAILLLKNGLYYLGIMNAKN |
| | | KPKIKDFKTSESEDCYDKMVYKLLPGPNKMLPKVFFSEKGLATFKPPK |
| | | DILDGYNAGKHKKGDLFDIGFCHQLIDFFKESIAKHPDWKKFDFKFS |
| | | DTSSYEDISGFYKEVTDQGYKITFSKIPTPQIDEWVNEGKLFLFQIYNK |
| | | DFAPGAKGSPNLHTLYWKSVFSPENLKDVVVKLNGEAELFYRPSSVK |
| | | KPYSHKVGEKLVNRIGKDGLPLPESVFGELFRYFNGKLDGELSDEAKR |
| | | YLDVAVVKDVKHEIVKDRRYTQDKFEFHVPLTLNFKADSKNEYMNE |
| | | RVRHFLKDNPDVNIIGIDRGERHLLYMTLINQKGEILKQKSFNIVESV |
| | | NYQAKLVQREKERDTARRSWSSVGKIKDLKEGFLSQVIHEITTTMIE |
| | | NNAIVVLEDLNFGFKRGRFCVERQVYQKFEKMLIDKLNYLVFKNKPE |
| | | GDVGGVLKGYQLAEKFDSFQKLGKQSGFLFYIPAAYTSKIDPTTGFA |
| | | NLFNMTELTSAEKKKEFLSHFEDITYDGKNDRFLFSFDYKKFKCFQTD |
| | | YIKKWTVYSQGKRIVYDKESKSAKAISPVEIIKAALAKQNIALTDQLDV |
| | | LSAINSVEASRETASFFGDICYAFEKTLQMRNSIPNTDEDYLVSPVM |
| | | NKKGEFYDSRSCGDSLPKNADANGAYHIALKGLYLIKNVFDAGGKDL |
| | | KISHEDWFKFAQSRNR |
| 93 | Cas12 | MQTLFENFTNQYPVSKTLRFELIPQGKTKDFIEQKGLLKKDEDRAEK |
| | | YKKVKNIIDEYHKDFIEKSLNGLKLDGLEEYKTLYLKQEKDDKDKKAFD |
| | | KEKENLRKQIANAFRNNEKFKTLFAKELIKNDLMSFACEEDKKNVKE |
| | | FEAFTTYFTGFHQNRANMYVADEKRTAIASRLIHENLPKFIDNIKIFEK |
| | | MKKEAPELLSPFNQTLKDMKDVIKGTTLEEIFSLDYFNKTLTQSGIDIY |
| | | NSVIGGRTPEEGKTKIKGLNEYINTDFNQKQTDKKKRQPKFKQLYKQ |
| | | ILSDRQSLSFIAEAFKNDTEILEAIEKFYVNELLHFSNEGKSTNVLDAIK |
| | | NAVSNLESFNLTKIYFRSGTSLTDVSRKVFGEWSIINRALDNYYATTY |
| | | PIKPREKSEKYEERKEKWLKQDFNVSLIQTAIDEYDNETVKGKNSGK |
| | | VIVDYFAKFCDDKETDLIQKVNEGYIAVKDLLNTPYPENEKLGSNKD |
| | | QVKQIKAFMDSIMDIMHFVRPLSLKDTDKEKDETFYSLFTPLYDHLT |
| | | QTIALYNKVRNYLTQKPYSTEKIKLNFENSTLLGGWDLNKETDNTAII |
| | | LRKENLYYLGIMDKRHNRIFRNVPKADKKDSCYEKMVYKLLPGANK |
| | | MLPKVFFSQSRIQEFTPSAKLLENYENETHKKGDNFNLNHCHQLIDF |
| | | FKDSINKHEDWKNFDFRFSATSTYADLSGFYHEVEHQGYKISFQSIA |
| | | DSFIDDLVNEGKLYLFQIYNKDFSPFSKGKPNLHTLYWKMLFDENNL |
| | | KDVVYKLNGEAEVFYRKKSIAEKNTTIHKANESIINKNPDNPKATSTF |
| | | NYDIVKDKRYTIDKFQFHVPITMNFKAEGIFNMNQRVNQFLKANPD |
| | | INIIGIDRGERHLLYYTLINQKGKILKQDTLNVIANEKQKVDYHNLLDK |
| | | KEGDRATARQEWGVIETIKELKEGYLSQVIHKLTDLMIENNAIIVME |
| | | DLNFGFKRGRQKVEKQVYQKFEKMLIDKLNYLVDKNKKANELGGLL |
| | | NAFQLANKFESFQKMGKQNGFIFYVPAWNTSKTDPATGFIDFLKPR |
| | | YENLKQAKDFFEKFDSIRLNSKADYFEFAFDFKNFTGKADGGRTKWT |
| | | VCTTNEDRYAWNRALNNNRGSQEKYDITAELKSLFDGKVDYKSGK |
| | | DLKQQIASQELADFFRTLMKYLSVTLSLRHNNGEKGETEQDYILSPV |
| | | ADSMGKFFDSRKAGDDMPKNADANGAYHIALKGLWCLEQISKTD |
| | | DLKKVKLAISNKEWLEFMQTLKG |
| 94 | Cas12 | MIDNTKEKKEGSVFDGFTRKYQLSKTLRFELRPILNTPKMLDDEQVIK |
| | | NDETRRKKYEAVKPWFDQLHREFIEDALKSFKFKNLAIYQDTFQTW |
| | | QKDRKSKQKKDTLVKIEVGLREEIVRRFEEVANIWVRSEQYKLLGIKK |
| | | EGLGMLFEAGVFRLLKERFKNEKDTTVDGNNIFDEWTRWTGYFKKF |
| | | FETRKNFYKSDDTSTAIAYRVINQNLRRFCENIQIFEKISEKIEFSEVEK |
| | | SFDISCAGIFSLAYYNACLLQGGIDTYNKIIGGEVDEKDKKIPGINELIN |
| | | KYRQDNSGEKIPFLKQLDKQIHSAKEAFIESIETNKELVGKLKTFYENA |
| | | EVKIQSFRNLIADIVTDYSGYDIDKIYLTKEAVSHNASRWFASFESFER |
| | | DLFAVVAEKQNKLVYELLRTHKNDSKISDKDGKFSFPDFIKCSHIKRA |
| | | LEKQEGRIWKGEYYEDIVDFEKIKDVFTQFLCVFKFELEQQFFRKTTS |
| | | AQTGEQTKIGYEIFVTKINELITRENPVIDLEEKIAIKNFADATLLIYOIA |
| | | KYFAVEKRRGWLDNYDLDDRFYKSSDIGYLNFYRDAFEQIVRPYNLF |
| | | RNYLTKKPYNTNKWVLSFENPTLADGWDKNKEKTNAAVILRKDGR |
| | | YYLGIIKEDCKSLFADRYSKEMSEGIESGSFQKMAYKFFPEASKMIPK |
| | | CSTQTKNVKEHFRKSSSDYNLFHEKDYKISVAITKNIYELNNVFYRKD |
| | | NIEESFVPKNDFEKKLGVKKFQRQYLEISRDNNGYKQALAQWIEFCI |
| | | RFLKAYKSTTIFDYSRLREAKEYESLDAFYQDINALTYNISFVPISEQYIK |
| | | EKNDNGELFLFEIYNKDWSLGPMDKNRKRTKNLHTLYFEQLFSKEN |
| | | EQENFLFQLNGEAELFFRPKTEEKRLGYKVWDAGEKKWVKAKEKED |
| | | GAVIDRKRYAKDIILFHCPITLNRVSESKTKREMDVEIREVLSSTPGVH |
| | | IIGVDRGEKHLAYYSVIDQNGKIIETDTLNSIGKDGRGKPVEYASKLEK |
| | | RAQEREASRRDWEEVEAIKDLKKGYISQVIRNLADLIIKHNAIIVFEDL |
| | | NMRFKQIRGGIEKSAYQQLERALIDKLSFLVKKGEEDPKQTGHILRAY |
| | | QLAAPVIAFKDMGKQTGLIFYTQAGYTSKTCPECGYRRNIKCLFENIE |
| | | QAKTLIENLESINYNKKEDVFQISYSLEKLSSKDQKKEKKVSNELYAKT |
| | | LKKDIFILTTKNALRYKWYDRYSEKAKVAKRGIDEYKGEVNESETKKG |
| | | VVKEFNLTEYLKGLLKTYEIDYEHGGIREQILSVARGREFYKDFLYALFL |
| | | LTETRHSISGRNTDYIQCPECEFDSRKGFKDIKEFNGDANGAYNIARK |
| | | GIMILEKIKQFKKDNDGNLEKMGWGDLSISIEEWDKFTQKE |
| 95 | Cas12 | MKNFQDFTNLYELSKTLRFELKPIGGTKKLIEEKNILKLDKKKRENYEK |
| | | VKPYFNKIHQEFINFALRNPNFDFSQFEEKYLNWLKDKKNKDLLKEK |
| | | ESIDKIFLEKIGKLFENSVKDFLKENGFESIVKEEDQNLKFFRRKEIFEVL |
| | | QEKYGSELETQMVNKDGEIKSIFNGWEKWLGYFDKFFNTRDNFYKT |
| | | DGTSTAIATRIIKDNLKIFLENIVAFGKIKNKKIDFSEVEKNFSVSIDTFF |
| | | EINNFNNCFLQDGIDFYNKVIGGETLENGEKLKGLNEIINKYRQDTGE |
| | | KIPYFKKLQKQILSEKDGVFIDKIEDDGGFYEVLKNFYKNAAEKEGFLK |
| | | NIFENFYTISDKNLEKIYFNKIAFNTISHKFGSALEFERILYEEMKKEKA |
| | | DGIKFEKKENKYKFPDFIQIIFIKRSLENYDSENLFWKERYYKSEENVD |
| | | GFLEKNNNNLWGQFCKILNFEFLNILKRRIIDEAGEEYEVGFEISKNIL |
| | | GEKLENFELNQENKGIIKDFADYSLALYSFGKYFAVEKGRNWDLNIDI |
| | | SDDFYGGEDGYIEKFYNTGYDEIVKPYNLMRNYISKKPWEDNKKWK |
| | | INFETSSLLSGWDKNLESNGSYIFQKGNKYYLGIINGSKPAKEILEKLYS |
| | | GDGEKIKRFIYDFQKPDNKNTPRMFIRSKKDSFSPAVEKYNLPINDIL |
| | | EIYDNGLFKTENKGNPNYKESLRKLIDYFKLGFSRHESFKHFNFVWK |
| | | DSKSYENIADFYRDVEKSCYKIDFEFLNFEELKKLTFEKHLYLFQIYNKD |
| | | FELDESLQEKGYNFKGEGQKNIHTKYFEALFLEENISRKSGAVFKLSG |
| | | GGEVFFRKKSIKAKKEKRNSVEVIKNKRYTECKYFLHFPIQVNFKEEIS |
| | | GNFNQEINKFLANNPDINVIGIDRGEKHLAYFSVINQKGEILESGSFN |
| | | KIENYNKNGEKLLFPEREIKEIHKDGSLIDLELVETGRKVDYVDYKLLLE |
| | | YKERKRLLQRQSWKEVEQIKDLKKGYISALVRKIADLIIKHNAIVIFEDL |
| | | NFRFKQIRGGIEKSIYQQLEKALIDKLNFLVNKNEINLEKAGSILKAYQ |
| | | LTVPVDSLKEIGKQTGVIFYTEAAYTSKIDPITGWRPNLYLKKNNSKIN |
| | | KENILKFDNIVFNSKENRFEFTYDLKKFFGKDSKFPAKTVNTVCSCVE |
| | | RFKWNRNLNNNKGGYIHYENLTDGKLANKEQKEDEFSNFKELFEKY |
| | | FIDINGNILEQIKNLDTKNNEKFFSSFIDLFTLVCQIRNTNQNAKGDE |
| | | NDFILSPVEPFFDSRKSQNFGKSLPKNGDENGAFNIARKGLIILNRISE |
| | | NPEKPDLLIFNADWDNFARNI |
| 96 | Cas12 | MSNNFQEFTQKYALSKTLRFELKPVGKTKEILEKEMPMYQIINADKN |
| | | IKAKYIQTKPFFDQLHRDFIKEAFENVELSGLSDFFENWKIYKQDKKA |
| | | NEKIYKKSAENLRKEVVSFLNAKGKDWAEKYHSSGLKKADIEILFEEGI |
| | | FKVLEIRYGTDTNSFITNATTGEITSIFQGWKGFTGYFLKFWNTRENY |
| | | YKTDGTSTAIATRIVDQNLPGYLENLEIFEKMKGKIDFESVRGDFSDF |
| | | EKIGTVEYYSTCLLQEGIDGYNRIIGGYTYENGEKIKGINEIINLYRQTH |
| | | KDEKVPFLKTLDKQIGSEKIAFMETIDTPEEFRKIFEEFVLKSSEKVVLL |
| | | KQCLNHLFENELTDGVFLSKESLNTISHKWIDIGNMKLFHESLFTILKK |
| | | EGAKYDSKEDEYKFPDFIRISDIKTALVKITTESFFWKNRYLYEKDENP |
| | | TGFLTSDNSLWEGFIQIFSHEFSSLFERTEKDEEGKDIQWGYDISLLNI |
| | | QKLLENNEYNPNDEKNKIIIKSFADDILRIYQMGKYFALEKKRQWNP |
| | | DNLEIGEFYSHPEIGYDKFYFDSYKIIVQGYNDIRNYLTKNPWSEEKW |
| | | KLNFENPTLANGWDKNKETDNSCIFLKRDNKFFLALMSRGNNQVF |
| | | DERNIQKFAQNIEQGKYEKMVYKYMKDVALGIPKATTQLNAVQEH |
| | | FFQSDKDYIITKGGSSIGEFIKPLRVTKRIFELNNRIYPKDNLGISFLRN |
| | | QVNKKEQKNYIKIFQKEFITLGGDEVVYKKAVHDWIDFCKEYTKSYPS |
| | | CAYFDYSGLKDTKEYSSIDEFYNDLDSFGYQISWQDISSSYIDELVESG |
| | | KLYLFEIYNQDFSNGKTGAKNLHTLYFEHIFSKENQEVNFPLKLNGQ |
| | | AELFFRPKSIEAKGENRKFNREIIAKKRYTEDKIFFHVPLTLNRTEGDIY |
| | | GFNTEINNFLAHNPDINIIGIDRGEKHLAYYSVIDQKGNIIESDSLNTV |
| | | NEINYGEKLTDTAEKRKQARQDWQAVEGIKNLKKGYISAVVHKLTD |
| | | LIIKYNAIVIFEDLNMRFKQIRGGIEKSVYQQLEKALIEKLNYLVEKGEI |
| | | NPEKAGHLLNAYQLTAPFETFKDMGKQTGIVFYTQAAYTSKIDPVT |
| | | GWRPHLYLKYSSAEQVKKEIAKFSNIIWNNTEKRFDFMYDIRNFSTQ |
| | | KEYPKNNIWTVCSSVERYRWDKTLNQNKGDYVHYKSITPEFEKLFSD |
| | | FQIDGTKNILEQINRMETKGNEKFFKSFIFFFGLICQIRNTNKADSDE |
| | | NKQDFILSPVVPFFDSRDSENTKNGLPRNGDENGAYNIARKGLIILQ |
| | | KINEFSDENGNCDKLGWKELSISQVDWDNYIKT |
| 97 | Cas12 | MEYDEHISLIESEEKADEMKKRLDMYMNMYHWAKAFIVDEVLDRD |
| | | EMFYSDIDDIYNILENIVPLYNRVRNYVTQKPYTSKKIKLNFQSPTLAN |
| | | GWSQSKEFDNNAIILIRDNKYYLAIFNAKNKPDKKIIQGNSDKKNDN |
| | | DYKKMVYNLLPGANKMLPKVFLSKKGIETFKPSDYIISGYNAHKHIKT |
| | | GENFDISFCRDLIDYFKNSIEKHAEWRKYEFKFSATDSYNDISEFYREV |
| | | EMQGYRIDWTYISEADINKLDEEGKIYLFQIYNKDFAENSTGKENLH |
| | | TMYFKNIFSEENLKNIVIKLNGQAELFYRKASVKNPVKHKKDSVLVN |
| | | KTYKNQLDNGDVVRIPIPDDIYNEIYKMYNGYIKESDLSGAAKEYLDK |
| | | VEVRTAQKEIVKDYRYTVDKYFIHTPITINYKVTARNNVNDMAVKYI |
| | | AQNDDIHVIGIDRGERNLIYISVIDSHGNIVKQKSYNILNNYDYKKKLV |
| | | EKEKTREYARKNWKSIGNIKELKEGYISGVVHEIAMLMVEYNAIIAM |
| | | EDLNYGFKRGRFKVERQVYQKFESMLINKLNYFASKGKSVDEPGGLL |
| | | KGYQLTYVPDNIKNLGKQCGVIFYVPAAFTSKIDPSTGFISAFNFKSIS |
| | | TNASRKQFFMQFDEIRYCAEKDMFSFGFDYNNFDTYNITMGKTQ |
| | | WTVYTNGERLQSEFNNARRTGKTKSINLTETIKLLLKDNEINYADGH |
| | | DVRIDMEKMDEDKNSEFFAQLLSLYKLTVQMRNSYTEAEEQEKGIS |
| | | YDKIISPVINDEGEFFDSDNYKESDDKECKMPKDADANGAYCIALKG |
| | | LYEVLKIKSEWTEDGFDRNCLKLPHAEWLDFIQNKRYE |
| 98 | Cas12 | MFGNWGVIQNAVMQNIKRVAPARKHKESEEDYEKRIAGIFKKADS |
| | | FSISYINDCLNEADPNNAYFVENYFATFGAVNTPTMQRENLFALVQ |
| | | NAYTEITALLHSDYPTEKNLAQDKANVAKIKALLDAIKSLQHFVKPLL |
| | | GKGDESDKDERFYGELASLWAELDTMTPLYNMIRNYMTRKPYSQK |
| | | KIKLNFENPQLLGGWDANKEKDYATIILRRNGLYYLAIMNKDSKKLL |
| | | GKAMPSDGECYEKMVYKLLPGANKMLPKVFFAKSRMEDFKPSKEL |
| | | VEKYNNGTHKKGKNFNIQDCHNLIDYFKQSIDKHEDWSKFGFKFSD |
| | | TSTYEDLSGFYREVEQQGYKLSFARVSVSYINQLVEEGKMYLFQIYNK |
| | | DFSEYSKGTPNMHTLYWKALFDERNLADVVYKLNGQAEMFYRKKSI |
| | | ENTHPTHPANHPILNKNKDNNKKESLFEYDLIKDRRYTVDKFMFHV |
| | | PITMNFKSSGSENINQDVKAYLCHADDMHIIGIDRGERHLLYLVVIDL |
| | | QGNIKEQFSLNEIVNDYNGNTYHTNYHDLLDVREDERLKAROSWQ |
| | | TIENIKELKEGYLSQVIHKITQLMVKYHAIVVLEDLNMGFMRGRQKV |
| | | EKQVYQKFEKMLIEKLNYLVDKKADASVSGGLLNAYQLTSKFDSFQK |
| | | LGKQSGFLFYIPAWNTSKIDPVTGFVNLLDTRYQNVEKAKSFFSKFD |
| | | AIRYNKDKEWFEFNLDYDKFGKKAEGTRTKWTLCTRGMRIDTFRNK |
| | | EKNSQWDNQEVDLTAEMKSLLEHYYIDIHSNLKDAISAQTDKAFFT |
| | | GLLHILKLTLQMRNSITGTETDYLVSPVVDENGIFYDSRSCGDELPEN |
| | | ADANGAYNIARKGLMMIEQIKDAKDLDNLKFDISNKAWLNFAQOK |
| | | PYKNG |
| 99 | Cas12 | MSNLYSNLHNLYQVQKTLRFELKPQGKTKENMEKVGILKADEHRAE |
| | | IYSKVKKYCDEYHKLFIDKSLSNIELNGIDRYYELYSINNRDDKOKEELD |
| | | QLEASLRKQISDAFKKSAEYKGLFQKDIITSYLVTMYKENQEKMQDI |
| | | GEFNRFTTYFTGYNKNRENMYSEEDKSTAISYRLINENLPTFIDNIKIY |
| | | KKIVSLMPEDIEKIYKDLEEYIQVDSIDEIFNISYYNDVLTQRGIECYNIL |
| | | ISGRTKNDGDKIKGLNEYINEFNQTHNEKIPKLQELYKQILSDAESASF |
| | | KIDVIKNDKELMNLIEVYYANILPILNKIEDLFTRISNYNLELILVNNDG |
| | | TLSTLSNMVFNEWSYIKGAISEKYDEEYSGKEKYGTEKYAQKKQEYLK |
| | | KQKIYSLKFLNDCIGNNAICEYLKNYIIQNKNIETIKEDYNEVQNIKVE |
| | | DDTKELIKDEKSIEKIKKFLDDVKSLQEFVKLVIPKDRTVEKDAKFYSEL |
| | | TPYYEKIKEIIPLYNKVRNYVTQKPYSTEKIKLNFECPTLLKGWDANKE |
| | | EANLGVILLKEGKYYLGIINPYCKKIFEVDEKDSNEQNNYKKMEYKLL |
| | | PGPNKMLPKVFFSNSRIEEFNPSKELQEKYNKGYHKKGKDFDINFCH |
| | | ELIDFYKQSVNKHEDWKKFNFKFKDTSEYNDISEFYREVEKQGYKIEY |
| | | TEYSEKYINELVDRGELYLFQIYNKDFSEYSKGKENLHTLYWKAVFDP |
| | | DNIMNPVYKLNGNAEVFYRKKSLEMKVTHPANQPIANKNISTIEAG |
| | | RSTSTFKYDLIKDKRYTMDKFQFHVPITMNFKSERLFNINQIVNKYLK |
| | | YNDDIHVIGIDRGERNLLYVCVIDKNEKIVYQKSLNEIVSEYNNNRYT |
| | | TDYHGLLDRKEKEREIAREDWKNIENIKELKEGYMSQVIHILVELMKK |
| | | YNAIIVIEDLNKGFKNSRIKVEKQVYQKFEKMFIDKLNYLVFKDEDKM |
| | | NEGGVLNAYQLTNKFESFTKLGKQSGILYYIPAWCTSKIDPTTGFINR |
| | | FYLKYENFDKSKEFVNRIDDIRYNEKENLFEFDIDYSKFTDRLNDTKNK |
| | | WTLCSYGERILTQKNANGEWLDRRIQLSIEFKKLFEKYGINLNNIKDSI |
| | | LKLDKDNLEFYKGNGESLGFIQLFKLMVQMRNSLTGKEEDNLISPVK |
| | | NQHGKFFNTSEKIEGLPIDADANGAYNIARKGFMLVEQMKNVEDE |
| | | KLNKIKYNITEKEWLNYVQNRGM |
| 100 | Cas12 | MARIFEDFKRLYPLSKTLRFEAKPIGATLDNIVKSGLLDEDEHRAESYV |
| | | KVKKLIDEYHKVFIDRVLDNGCLPLKNEGHNNSLTEYYDSYVSKSQN |
| | | EDAKKAFEENQQNLRSIIAKKLTEDKAYANLFGKNLIESYKDKTDKTKI |
| | | IDSDLIQFINTAESTQLNSMSQDEAKELVKEFWGFTTYFVGFFDNCK |
| | | NMYTAEEKSTGIAYRLINENLPKFIDNMEAFKKAIARPEIQANMEEL |
| | | YSNFSEYLNVESIQEMFLLDYYNMLLTQKQIDVYNAIIGGKTDDEHD |
| | | VKIKGINEYINLYNQQHKDDKLPKLKALFKQILSDRNAISWLPEEFNS |
| | | DQEVLNAIKDCYERLSENVLGDKVLKSLLGSLADYSLDGIFIRNDLQLT |
| | | DISQKMFGNWGVIQNAIMQNIKRVAPARKHKESEEDYEKRIAGIFK |
| | | KADSFSISYINDCLNEADPNNAYFVENYFATFGAVNTPTMQRENLF |
| | | ALVQNAYTEVASLLHSYYPAEKKLAQDKANVAKIKALLDAIKSLQHFV |
| | | KPLLGKGDESDKDERFYGELASLWAELDTVTPLYNMIRNYITRKPYS |
| | | QKKIKLNFENPQLLGGWDANKEKDYATIILRRNGLYYLAIMDKDSRK |
| | | LLGKAMPSDGECYEKMVYKLLPGANKMLPKVFFAKSRMDDFKPSK |
| | | ELIEKYNNGTHKKGKNFDIQDCHNLIDYFKQSIDKHEDWSKFGFNFS |
| | | DTSTYEDLSGFYREVEQQGYKLSFARVSVSYINQLVEEGKMYLFQIY |
| | | NKDFSEYSKGTPNMHTLYWKALFDERNLADVVYKLNGQAEMFYRK |
| | | KSIENTHPTHPANHPILNKNKDNKKKESLFEYDLIKDRRYTVDKFMF |
| | | HVPITMNFKSVGSENINQGVKEYLHHADDMHIIGIDRGERHLLYLVV |
| | | IDLQGNIKEQYSLNEIVNEYNGNTYHTNYHDLLDAREDERLKARQS |
| | | WQTIENIKELKEGYLSQVIHKITQLMVKYHAIVVLEDLNMGFMRGR |
| | | QKVEKQVYQKFEKMLIDKLNYLVDKKADASVSGGLLNAYQLTSKFD |
| | | SFQKLGKQSGFLFYIPAWNTSKIDPVTGFVNLLDARYQNVEKAKAFF |
| | | SKFDAIRYKRIRTGLSLISTMTSLVKKQKVQGLSGFYAPEECVLILSEIK |
| | | KKTHNGIIRKLT |
| 101 | Cas12 | MISLNYFQNQYAVAKTLCLELRPIEKTMEYIISSGILKEDEHRNESYKL |
| | | VKKIIDDYHKAYIELSLSRFELKITSCSKNDALEDFYCQYLANSQEEKDK |
| | | NIFKKTQDNLRKQIAKHLTQGEAYKRIDKKELIQEDLLEFVAADPDAA |
| | | NKKILINEFRDFTTYFTGFYENRKNMYSEEAQSTAIAYRIIHENLPKFID |
| | | NMGTFKQLMQSSITDILPQIFDNFKKDLEVSSIQEIFDLNYFNKVLTQ |
| | | KQIDIYNAIIGGKSLNENSRIQGLNEYINLYNQQHKENKLPLLKLLFKQ |
| | | ILSDRNSLSWLPEAFETDKQVLHAVRKCYANLKESVLHEAGLVQLLSS |
| | | LPSYDSTRIYIRNDQALTTISQKLFGDWGIIPHAIKERLKKDISAKRKET |
| | | EEAYLERIEKAFKQADSYTIAYINDSLKEIGVDKKNIEDYFIHLGAICTE |
| | | GQEQENILQRIASAYSQAQPLLEEKVPVHKNLMQDKDSVELIKSLLD |
| | | ELKNLQHFIKPLLGKGSESDKDERFYGEFVGLWNELDQITTLYNKVR |
| | | NYVTRKPYSIEKFKINFQNATLLKGWDRNKERDNTSIILRKNGLYYLAI |
| | | MRKEYNKVFEKYPAGTEENCYEKMEYKLLPGANKMLPKVFFSKSRI |
| | | NEFNPSPQLLQNYQMGTHKKGDQFKKEDCHALIDFFKTSIEKHED |
| | | WKNFNFQFSPTSVYEDMSGFYREVEQQGYKLVFRSIDAEYIDKLVEE |
| | | GKIFLFQIYNKDFSPFSKGTPNLHTLYWKMLFDERNLNNVVYKLNGE |
| | | AEIFFRKKSITYTHPTHPAEIPIKNKNVQNKKKESVFQYDLIKNHRFTI |
| | | DSFQFHVPITMNFKNAGLSNLNEQ.VYTYLRENKDAHIIGIDRGERHL |
| | | LYLVVIDRYGRIVKQFSLNEIVNEYHGNTYTTNYHDLLDKREEARQQ |
| | | ARQSWQSIENIKELKEGYLSQVVHKIANLMVEYHAIVVLEDLNIGFM |
| | | RGRQKVEKQVYQKFEKMLIDKLNYLVDKKKAPEADGGLLKAFQLTN |
| | | QFESFQKLGKQSGFLFYVPAWNTSKIDPCTGFTNLLDTRYENIAKAQ |
| | | KFFRTFDAIRYNAVKDYFELELDYDKFHKRAEGTQ.TKWTLCTYGTRIK |
| | | TFRNPENNNQWDNVEINLTEEFKKLFKQFGINLSGDLQQAICAQTE |
| | | KSFFESLLRLLKLTLQMRNSITGTDVDYLLSPVQNAEGYFYDSRKGDK |
| | | SLPANADANGAYNIARKGLWVIQQIKQTPQGQKAKLSISNKEWLKF |
| | | AQEKPYLKD |
| 102 | Cas12 | MKTFENFTNLYSLPRTLRFELKPLYKTKELIDSKQELFPKDKRIDEIYQN |
| | | IIKPCLNELHSDFIEKSMENKDFQNIPDNILKIYSNEKNIDDFKNIEKDL |
| | | IKQINWFLKSNKTFFAENYSDLLGKNSIDIIIKVFWEKIYKKDDSWKIF |
| | | LYNDLLWKSYEELINIYFKWFSTYLSNFNKNRENLYDKKNEAKVWSV |
| | | SGRTIWENFPRFLQNCINFRDKLEKLNLSIEQKDIFITNNFWKCISQK |
| | | QIDYYNKIIWQINSKTNEFNQKNGLKWNKKLPKLLLLHKQILWKSEN |
| | | ENILNFINNIIQ.TDFELEQ.EIKIINKDIFQ.RIDFIKKSIVSNIEDFELEKIFIK |
| | | KNRLKDISSLLMDNYSVLEKLLPEFNEEWKIIKENELVNLSKIKKSFENI |
| | | DLKDLKNIFKKEYFDESKDWFKLFLNWIYNHFSDLENNIKHTHKLVQ |
| | | DKLISWNFSENIQKSEKNINLRDEIFVSSKWLLKAYLDSILALDRFVH |
| | | MFDYWEQKDFDSNFYNNIEEYSINFSPFKTYNAVRNYLTKKNYSTD |
| | | KIKLNFDYPDFLGSNSLWKYAFIYKDSKWFYYLWVLDHSNSQSKYKP |
| | | QILKNNTEFYQLEYKQIKFNTLAWKWYIRDFWVKYSEDENCIINLKTL |
| | | IKKQYLERYPVLKEIVDFQTDDKKIFDAKVKTILEQAYSINFVNIDKNYI |
| | | LEENNNWNLHFFQIYNKDFSENKKINSMENLHTMYFKALFEKENFN |
| | | WWACFKLNSQWAEIFFREKSINEKKVKDLKTRNENAIEKKRYTENK |
| | | VFLHLPITLNFINKWYSKYSFWYINDSVKKYIKENKISIIWIDRWEKNLI |
| | | YFSMINENLEIIELKSLNSLILKVSDLEEKEVNYFEKLSKKEWNRNKER |
| | | KDWDEIETIKELKEWYISQIVDNLVKLIVKHNAIVVMEDLNSGFKRW |
| | | RQKIEKQIYQKFELALAKKLNFTVDKNKKHDELWWIYKAYQLTPQIE |
| | | NFQDIYSQTWIIFYTQAAYTSVTCPNCSFRKNIYQKYENESKFKEFFK |
| | | KYILEIKFEDNCFIIKYKIDEKIDKKKNKLKKLEFQVNTKNQIRLKFEKSL |
| | | KWKWWETKEFNITEKFKEIFEKHKLDLWNLKEELLAWNWEIQLYKD |
| | | FMFYFNLLLQLRNSKENDNWWYISCPSCWFHSGNWFQWFSYNW |
| | | DANWAYNIARKWRIILDKIKKDEKNLWITNVEWDNYYOK |
| 103 | Cas12 | MAVRSVKLKLLVPRDGSAESVRKRKALWATHQFVNDAAAAYAELLL |
| | | EMRQEDVCRGTDDHGKDVIEPAAHWQAKLRARLAAKQLPPVAVA |
| | | EALPLLKAFYGSRLIKSFVANDKGVAGTGNATDLNTWLSGLVDPASV |
| | | AGEKTELRKQLLAELPLCEAADADFEGAARKMLAKSDAREALLEGP |
| | | GTGVGWPAAYNANPTDSVWLDMLHKAAAKARLELADTTVSELKK |
| | | LGVFPLLQAASSNRVFGSGVLNPFERMAAAQAAAALLPWETKRHE |
| | | MRKRRDKFADQLNQWDTEFGASHATALAAIRAFEAEESERARRESL |
| | | GNEGTGYRIGGRELRDAWTLLRDWLKGHSTATAAAREDKVRELQA |
| | | KQGRSFGSHRLLSWLAKPAQQWLADHSAGDVVTRIAVRNARQRK |
| | | LDTARTLPIWTGADAVKHPRFANFDPPNNTNQPGFDLRAGTOKGR |
| | | LTLRLSLLTERADGLLLAQDHDFQLVPSRQMAEIVLHKDGKERALSW |
| | | QSQDGIGRQVGDVGGSALLFSRDHAECLLERKQITRLERGAWPAAL |
| | | PVWFKLSLDIGAEHKALLKQRFKWGVWLNSALVTRNAKDAKGVPP |
| | | PVGTRVLAVDLGLRSAATVSVWQVVDAATPVVAGKWRVPLSDTLS |
| | | AVHERSAMLALPGEHVDAGVLAARRAANEKLAGLLAATSHLSTVFK |
| | | LGRAEQGDRRRELLERLGEGDDRRARAAVATTAAERDGLRAVLGA |
| | | TQDAWAGAVAAVWRRLETDLAGAIAAYRKQQREDVQLRREARHG |
| | | PGASQLPKQAAAERLLGGKSAWQIEYKERVRKLLTRWIMRQRPGD |
| | | TAVRRLARKDLGKYCGGLLDHLTALKEDRAKTTADLIVQAARGRVR |
| | | AHKDAHGRQQDRELWLAKYAPCDLIVMEDLGRYRFATDRPPSENR |
| | | QLMQWTHREVFRLVQMQAEVEGIQVLETGAEFSSKFDARTWAPG |
| | | VRCEPITKLWVERYRNGEMPWLADKADEWRREGIELAQLVPGQLL |
| | | PTGSGEQFVAVSATGGLRVRHADLNAAQCIALRALTGHGTAFRLTA |
| | | RRLGDVFVSAKGLGKRPQGALWREFGSALPPAVVVLRPAGEVRYAL |
| | | RPFASARDAAAALGLQLGALRNVDATDAESDAEDGDLAELLAGAD |
| | | PDRATFFRDPSGDVHGGAWVQAKVFWAEVRRHVRLGLQAQGLLP |
| | | AAARSSEPRQMQLPLAGALPGDDIPL |
| 104 | Cas12 | MLDKFASLYPVTKTLRFRLLPQGRTEENMovAKVLENDLERSEAAA |
| | | WKGLIKKYHLQFISDTLSGSTLSWQALTETLDKFKADHTATAELDSA |
| | | LAAYRCKLAELFTKSPKYKVMATPVSIIKEILKTETDPENIAALNKLNG |
| | | YTYIIFDYVSTRMLTYSADAKATSLAYRLVDENYLRFYQD1SAAAEISA |
| | | VLEEAGFDNAEVEAFIRTDYNTCLTSEGIASFNAAAGSINQFVNVLL |
| | | QQNPVLQSEPALRRHLQPLYKMLLDEAESKIIKFEDYGQLRDAVENF |
| | | RRNFQDLPQSLIDIFAGRYDYSKIYVGYKYLNEASSQIAGGYNWKLLE |
| | | NALEDFYSKPYLVNGKLPVKYKTVVNKKMNQLAYSFTELQEALDAG |
| | | DSGSSITDLFGKYAELHAAYAAADGNVFYKEYDRKSIASLKNYLDAV |
| | | NAIARFIKIFAAPEVYVKDEGFYGIVDGAADKLRDFDLLYNMVRNYIT |
| | | KKPYKKSKVALTFNSSSFGRGWDENKIYDELTTIFTYNGKYYLGVINK |
| | | NDKPDLAAAVSKDEGGYKRMVYKTFDIVKQLPRLSFTKAVKAHFAE |
| | | SDEDFIFDGPKFAKPLRVPKEIYLQSFTDNGDKLADSAKKYTKAYLD |
| | | MSGDYKGYYEAIIKRIDYTKEFLSAYKSTSIYDLAFLKPAGKAAGSLCW |
| | | TRHI |
| 105 | Cas12 | MKTFENFTNLYSLPRTLRFELKPLYKTKELIDSKQELFPKDKRIDEIYQN |
| | | IIKPCLNELHSDFIEKSMENKDFQNIPDNILKIYSNEKNIDDFKNIEKDL |
| | | IKQINWFLKSNKTFFAENYSDLLGKNSIDIIIKVFWEKIYKKDDSWKIF |
| | | LYNDLLWKSYEELINIYFKWFSTYLSNFNKNRENLYDKKNEAKVWSV |
| | | SGRTIWENFPRFLQNCINFRDKLEKLNLSIEQKDIFITNNFWKCISQK |
| | | QIDYYNKIIWQINSKTNEFNQKNGLKWNKKLPKLLLLHKQILWKSEN |
| | | ENILNFINNIIQ.TDFELEQ.EIKIINKDIFQ.RIDFIKKSIVSNIEDFELEKIFIK |
| | | KNRLKDISSLLMDNYSVLEKLLPEFNEEWKIIKENELVNLSKIKKSFENI |
| | | DLKDLKNIFKKEYFDESKDWFKLFLNWIYNHFSDLENNIKHTHKLVQ |
| | | DKLISWNFSENIQKSEKNINLRDEIFVSSKWLLKAYLDSILALDRFVH |
| | | MFDYWEQKDFDSNFYNNIEEYSINFSPFKTYNAVRNYLTKKNYSTD |
| | | KIKLNFDYPDFLGSNSLWKYAFIYKDSKWFYYLWVLDHSNSQSKYKP |
| | | QILKNNTEFYQLEYKQIKFNTLAWKWYIRDFWVKYSEDENCIINLKTL |
| | | IKKQYLERYPVLKEIVDFQTDDKKIFDAKVKTILEQAYSINFVNIDKNYI |
| | | LEENNNWNLHFFQIYNKDFSENKKINSMENLHTMYFKALFEKENFN |
| | | WWACFKLNSQWAEIFFREKSINEKKVKDLKTRNENAIEKKRYTENK |
| | | VFLHLPITLNFINKWYSKYSFWYINDSVKKYIKENKISIIWIDRWEKNLI |
| | | YFSMINENLEIIELKSLNSLILKVSDLEEKEVNYFEKLSKKEWNRNKER |
| | | KDWDEIETIKELKEWYISQIVDNLVKLIVKHNAIVVMEDLNSGFKRW |
| | | RQKIEKQIYQKFELALAKKLNFTVDKNKKHDELWWIYKAYQLTPQIE |
| | | NFQDIYSQTWIIFYTQAAYTSVTCPNCSFRKNIYOKYENESKFKEFFK |
| | | KYILEIKFEDNCFIIKYKIDEKIDKKKNKLKKLEFQVNTKNQIRLKFEKSL |
| | | KWKWWETKEFNITEKFKEIFEKHKLDLWNLKEELLAWNWEIQLYKD |
| | | FMFYFNLLLQLRNSKENDNWWYISCPSCWFHSGNWFQWFSYNW |
| | | DANWAYNIARKWRIILDKIKKDEKNLWITNVEWDNYYOK |
| 106 | Cas12 | MSFLVPHLPTVVSHRLGGYSSAMDQTPTRLTPAVKNTAAATPKPEV |
| | | PLTQRAYTLRLRGANDGDQSWREAVWATHEAVNMGAKVFGDWL |
| | | LTLRGGLDRELADAKVKAGNNNPDRNPTPEERRGRRVLLALSWLSV |
| | | ESAPKKGDAYEKFVIASGKKDSQSIRDEKVVRALREILAKRGVANQD |
| | | LEGWIVDCEPSLSAAIRDDAVWVNRSAAFDAAQCRVGTSLTREEIW |
| | | DLLKPFFGSCESYLASLTTDEDSDTEAAATDDKAKDLVQKAGQWLSS |
| | | RFGTGKGADFAAMSKVYSETAFWAGRASPFRSGAEALRLIAESLKSF |
| | | CPKSFDADGILGLISGPGYKSATRNIIKAWSKRAGPVTADDLANLSA |
| | | VAAEDANKCSANTGSKGHRPWSDAILCEVENACGFTYLQPDGPAL |
| | | HSEFAVMLDHAARRVSIGHSWIKRAEAERDRFTKDALRIKEVPDPIR |
| | | VCLDRFCADRAGTSGAIDGYRIRKRAVSAWKEVITRWGQAACKTAE |
| | | DRVIAVRETQADPDIDKFGDIQLFEALAVDDAECVWRVNGEVTPQP |
| | | LIDYAAATDAEAKQKRFKVPAYRHPDPLSHPVFCDFGNSRWKIRFA |
| | | AHDAVTKLANARTSLDRREADLAKAKERLDKATAPEEQTEGKESLEE |
| | | AERHLRDARDRVAWLSSMHAFSMRLWGAGRVGDGQRLFWSCKR |
| | | LTDDMALRQNSGQAPTIAVTRADRLGRAAAGADTADSVDILGVFT |
| | | EEHWNGRLQAPRAQLDVIAAHVAKNQWDAKAKKMRDRIRWLVS |
| | | FSAKLQPVGPWIEYSATFPEAALAKPFVSRKGEYAVRHVSNDDRAG |
| | | LGKLVLSRLPGLRVLSVDLGHRYAAACAVWETVSIAQTNAACDAAG |
| | | HELPTESDLFLQLSTTDLTGKNRTTIYRRIGADMITDPKTGEKTPHPA |
| | | PWARLERQFLVKLPGEDIPARKASPAEFDAIRRLEEAFGRTRTADDP |
| | | LLVRVDELLAATVDSARLALRRHGDAARIAYAFKPSAEKLTPGGGRE |
| | | VMSPEARKAMILDALLLWHGLWHGDRWADVWASQQWDAYIKP |
| | | ELGMDLPPWSETSGEPRCQYRSKVEGLLKRVAESLAARDGAGLHLL |
| | | WAEQWRTRNAKWLGNTGHLRTLRSLLLPRGLTTSTPAAWNVGGL |
| | | SLTRIATLKSLYQLHKAYHMRPEPEDPRKNVPAKGEEELRDFGRGML |
| | | DVMERLREQRVKQLASRLAEAALGIGRMKASEGKRDRKRPRAQID |
| | | QPCHAVVIENLKNYRPEETRTRRENRQLMSWSSSKVKKYLSEACQL |
| | | NGLHLREVQASYTSRQDSRTGAPGIRCADVPVQDFFTKPWWRRQ |
| | | VSIAVGRVNQGRGDARERFLADLDAKWSAAEKSERITAPPLRIPVN |
| | | GGELFVSADLHSPAALGLQADLNAAANIGLKALLDPDWPGKWWF |
| | | VPASLDADGWRVPAAKSCAGAEWVKNWKVGQLGDSYAPNGKPL |
| | | QPTDDEGVKKAEDGVKLAKASLDDAEQALKAAKKTKRKAEIDVASA |
| | | RAQEAKKNVDDMKKALVAAKKGASAKEIINLWRDPVGVDPADFAS |
| | | GEPWRAYTVYKQRVEYHVINDVLRGRAGPRSDRP |
| 107 | Cas12 | MSITRSIKVKLIVPRDASLEARQLREGLWATHLFVNDGCHYYERLLLE |
| | | FRQRDVCVGKDDAGKDVIVPAAEWADRLRARLGRNGMVPSHIEA |
| | | ALPIFRELYENMVPSALKAKSGTGQAGRSWHSKLVSPTSRGGEASA |
| | | ARIDVLRPLLPVSGDDPAFEPAARALIEEAGDELLTSTGRCPAWVTA |
| | | YRKGPEGSAWVEKLRIQLREAVEAGDFDPPSDPQILAAGAVPAAPP |
| | | LGAGIDALRPLLPLLGGDPAFEPAARALVEDIGDELFTSTGRPPTWV |
| | | TAHPTWVRAHRKDAECLEAADDFKWVERLRQRLRDDAKAGKFEQ |
| | | PLHERLGALGALPVAKPIGAGRVVSRADLTVFERGAMELAIEHLIGW |
| | | ESAGHRARAQYVERKKRHDDLLQWIEAEAPDALLAVRAYEAARTIH |
| | | LATLGELGAAPQYTLRLREIRPWRKLREWLLQNPDATIDERRRRLAT |
| | | MQTNDPRGYGGEALAWLAAPERRALVEHPAGDVVTRIAVLNIRKSI |
| | | LDRSRLFPTCTLADPVEHPRFAKFGKPGDKNSAGYALAVDGVRREAI |
| | | IKILVPRQDGLLVPTDLRVPFAPSGQMRDLRASGLDISYERQDGRGR |
| | | QAAKLQGGNLMFDRTHFARCGAPGPEALGSVWIKVALDLSSPAAS |
| | | LAMKTATPVRTYLSTAVRGRPESTKYEKAAPPEGFRVLSVHMGLRT |
| | | AATASMLRFGAPEEGGHEVPVSGLAGETLVAFHERTVTMKLPGED |
| | | PDTRTEANRGVAKRELRGLGRGIGCLKAIRRASASATPEDRAEALVII |
| | | ETHVGQGDRHGWAPAEAVGRLDPHGDPDDWKTACAALYAAVEA |
| | | DLGVAISSWRKAARAGGATGMLGGKSLWAVDHLERSFRFLRSWDL |
| | | RARPHDGDPRRPRPGYASKLLHHIDGVKDDRVKTTADRIVQAACG |
| | | RAWIGGPTVKRGTQDVRLPGRWEQRGPRADLILLPDLTHFRFRSDR |
| | | PRAENSRLMRWAHRQLAIYVRMQAEVEGILVADTGAAFTTRFDA |
| | | WTGAPGVRCEPVTADHLRGIAKREDYWLARLLREGALKHLRIDPAS |
| | | LRVDDLVPMDHGKILVALDGVDLPGLRILDTDVNASQGLGRRYIEG |
| | | HGLAYRLPGARVPRGEGEREAAVVHIKGKRLASAMGGTVVVLRASE |
| | | GPGDITWTAEVYDRPQGARKALGLSLAAFNSIATAAVDDEGPAPEN |
| | | DDEALEEEAEEALGIATGERIVFFRDPSGAVAGGGWLEASAFWGIA |
| | | NRMVTDRLRELGRLG |
| 108 | Cas12 | MATAVDTSTTRAYTLRLSGGNNWRELLWQ.THVAVNRGAWVWG |
| | | DWLLTLRGGLPASLADGDAERRVVLALSWLSVESPASLAPQAHIVA |
| | | YGSDARDERNRKVTERFRDILRRMGIKQQQEQEWLDACLPALMAS |
| | | IREDAVWVDRSACFAEAQQCYRGLSSEWARKTLFDFLGGEDDYFKP |
| | | SAKEGASSKAKDFVQKAGRWLSRHWGAGKKSDPRDISTRLGKLAG |
| | | VDPKAIDGHTGRAALEDLLRTLGSRPAQNADAEKLYRQLKRAVGW |
| | | KGRPSKGAVALKKIRDAERVPNDLWKEIASTLREEAAVQSSQTSDH |
| | | AAVPDWRSHWPAEITGLPMPYRVDRDYIWEHGVMLDHALRRVSS |
| | | AHTWIKRAEAERRRFQQDAAKMGSIPEEARNWLDAFRERRSSSSG |
| | | ATGDYLIRERAINGWDKVVQAWETLGPNSTRDQRIAAARDVQANL |
| | | DEDEKFGDIQLFAGFGDEHVDDPERCLADDRATCVWRNSSGRADG |
| | | RILKDYVAATVAEHNQRRFKVPAYRHPDPLRHPVFVDYGKSRWSIN |
| | | YSALTAAQQRRKTTQKLAQAKTDNTRAKLQQQLASTADLRSVTLGV |
| | | WDGNRIVKISQRWRSKRFWRDLDLDHFGSHPSAAVSRADRLGRVA |
| | | ARQDPGAAVYVAKVFEQQDWNGRLQVPRRELNRLADVVYGKGA |
| | | DPDFGKLERLDPRARRLWERLSWFLTTSATVOPQGPWLDYVAAGL |
| | | PSGIQYTKSRAGYYLNYDANHGRKGRARLCLARLPGLRVLSLDLGHR |
| | | YAAACAVWQTLTIEQMTNECRQAAHPAPSNDDLFIHLRHPTHKPQ |
| | | KSGRKKGRPVTKTTIYRRIGPDKLPDGTDHPAPWARLERQFLIKLQG |
| | | EDRPARYASQKEIDEVNQFRNFVGLEPIVDRPRVDDLHSDAVRVAR |
| | | LGLRRLADAARIAFAMTAAKKPISGGHEVELTTAQRIEFLQDALLLW |
| | | QSLAASRRYRDDWAEKLWQSWVVEKLGGPQPAEIADDLPRSQRA |
| | | ASLKTARQSLRKVAEKLSDGQSPSAAELHRLWAERWQQRQTEWR |
| | | RHLRWLRRLILPRRKDHQQEDRPLQRVGGLSVKRIQTIRQLYQVLKA |
| | | FRMRPEPSDLRKNIPAPGDRSLASFGRRILNHLERLREQRIKQLASRV |
| | | VEAALGAGRISKPPGRDRRRPQQPVDRPCHAVVIENLQHYKPEDSR |
| | | LRRENRQLMDW/QARNLRKYIVEGCELHGLLFVEVSPAYTSRQDSRT |
| | | GAPGLRCEDVSRTALQEAARRMHASHSRPSNSSPGGSQTQFEREV |
| | | CRWINEFKRVEGSSSSLSARQAVLKAFLHHQASIPTSLSTILLPRRGGE |
| | | LFVSADPDSPLACGLQADLNAAANIGLKALTDPDWMGAWWFVLV |
| | | DRASGQPVEEQVQGCPIWLSCGPLSNSNPATIDPSDSPTAARRSNG |
| | | TGAKGRARANEYWWSSLSATTLPDHKAWQPTQDYWRDIEQRVV |
| | | KRLLRLLDGSEWSED |
| 109 | Cas12 | MLDKFASLYPVTKTLRFRLLPQGRTEENMQVAKVLENDLERSEAAA |
| | | VVKGLIKKYHLQFISDTLSGSTLSWQALTETLDKFKADHTATAELDSA |
| | | LAAYRCKLAELFTKSPKYKVMATPVSIIKEILKTETDPENIAALNKLNG |
| | | YTYIIFDYVSTRMLTYSADAKATSLAYRLVDENYLRFYQD1SAAAEISA |
| | | VLEEAGFDNAEVEAFIRTDYNTCLTSEGIASFNAAAGSINQFVNVLL |
| | | QQNPVLQSEPALRRHLQPLYKMLLDEAESKIIKFEDYGQLRDAVENF |
| | | RRNFQDLPQSLIDIFAGRYDYSKIYVGYKYLNEASSQIAGGYNWKLLE |
| | | NALEDFYSKPYLVNGKLPVKYKTVVNKKMNQLAYSFTELQEALDAG |
| | | DSGSSITDLFGKYAELHAAYAAADGNVFYKEYDRKSIASLKNYLDAV |
| | | NAIARFIKIFAAPEVYVKDEGFYGIVDGAADKLRDFDLLYNMVRNYIT |
| | | KKPYKKSKVALTFNSSSFGRGWDENKIYDELTTIFTYNGKYYLGVINK |
| | | NDKPDLAAAVSKDEGGYKRMVYKTFDIVKQLPRLSFTKAVKAHFAE |
| | | SDEDFIFDGPKFAKPLRVPKEIYLQSFTDNGDKLADSAKKYTKAYLD |
| | | MSGDYKGYYEAIIKRIDYTKEFLSAYKSTSIYDLAFLKPAGKAAGSLCW |
| | | TRHI |
| 110 | Cas12 | MCIRDRDLAVAALNRGDAXXXXXXXXXXXXXXXXXXXXXXXXXXXX |
| | | XXXXXXXXXXXXXXXXXXXXXXXXXXXXXXXXXXXXXXXXXXXXXXXX |
| | | XXXXXXXXXXXXXXXXXXXXXXXXXXXXXXXXXXXXXXXXXXXXXXXX |
| | | XXXXXXXXXXXXXXXXXXXXXXXXXXXXXXXXXXXXXXXXXXXXXXXX |
| | | XXXXXXXXXXXXXXXXXXXXXXXXXXXXXXXXXXXXXXXXXXXXXXXX |
| | | XXXXXXXXXXXXXXXXXXXXXXXXXXXXXXXXXXXXXXXXXXXXXXXX |
| | | XXXXXXXXXXXXXXXXXXXXXXXXXXXXXXXXXXXXXXXXXXXXXXXX |
| | | XXXXXGQLNAIRNFLASDGYGAHDLVPVNYNGSNDRGAEVQVGN |
| | | QKNWTVTSSAPVVVQYNNADTTLTVQGHTDRLIVTGSGNDTITLK |
| | | DSGDDKVLLGDGNNTVVAGSGADTIVGGAGNDVLIGTNGGYGTEL |
| | | LGGAGNDVLRNAGSHGIYMDGGAGNDTFYGGTGPDTMEGGDG |
| | | NDLMYANGRGSSIDGGAGNDTIYGGPGGDTLTGGDGNDLLRSDS |
| | | AFGTKGSGNLLVGGAGNDTLWAGAGYDTLKAGSGSDTLISGTGSS |
| | | QMIGGSSGNTTFEVAYHTGNDTITGSGSGNTVYLDGRDFSDATISN |
| | | HSGVTTVSFSDGQVLKISGVQDIVFSDHDYKV |
| 111 | Cas12 | MSITRSIKVKLIVPRDASLEARQLREGLWATHLFVNDGCHYYERLLLE |
| | | FRQRDVCVGKDDAGKDVIVPAAEWADRLRARLGRNGMVPSHIEA |
| | | ALPIFRELYENMVPSALKAKSGTGQAGRSWHSKLVSPTSRGGEASA |
| | | ARIDVLRPLLPVSGDDPAFEPAARALIEEAGDELLTSTGRCPAWVTA |
| | | YRKGPEGSAWVEKLRIQLREAVEAGDFDPPSDPQILAAGAVPAAPP |
| | | LGAGIDALRPLLPLLGGDPAFEPAARALVEDIGDELFTSTGRPPTWV |
| | | TAHPTWVRAHRKDAECLEAADDFKWVERLRQRLRDDAKAGKFEQ |
| | | PLHERLGALGALPVAKPIGAGRVVSRADLTVFERGAMELAIEHLIGW |
| | | ESAGHRARAQYVERKKRHDDLLOWIEAEAPDALLAVRAYEAARTIH |
| | | LATLGELGAAPQYTLRLREIRPWRKLREWLLQNPDATIDERRRRLAT |
| | | MQTNDPRGYGGEALAWLAAPERRALVEHPAGDVVTRIAVLNIRKSI |
| | | LDRSRLFPTCTLADPVEHPRFAKFGKPGDKNSAGYALAVDGVRREAI |
| | | IKILVPRQDGLLVPTDLRVPFAPSGQMRDLRASGLDISYERQDGRGR |
| | | QAAKLQGGNLMFDRTHFARCGAPGPEALGSVWIKVALDLSSPAAS |
| | | LAMKTATPVRTYLSTAVRGRPESTKYEKAAPPEGFRVLSVHMGLRT |
| | | AATASMLRFGAPEEGGHEVPVSGLAGETLVAFHERTVTMKLPGED |
| | | PDTRTEANRGVAKRELRGLGRGIGCLKAIRRASASATPEDRAEALVII |
| | | ETHVGQGDRHGWAPAEAVGRLDPHGDPDDWKTACAALYAAVEA |
| | | DLGVAISSWRKAARAGGATGMLGGKSLWAVDHLERSFRFLRSWDL |
| | | RARPHDGDPRRPRPGYASKLLHHIDGVKDDRVKTTADRIVQAACG |
| | | RAWIGGPTVKRGTQDVRLPGRWEQRGPRADLILLPDLTHFRFRSDR |
| | | PRAENSRLMRWAHRQLAIYVRMQAEVEGILVADTGAAFTTRFDA |
| | | WTGAPGVRCEPVTADHLRGIAKREDYWLARLLREGALKHLRIDPAS |
| | | LRVDDLVPMDHGKILVALDGVDLPGLRILDTDVNASQGLGRRYIEG |
| | | HGLAYRLPGARVPRGEGEREAAVVHIKGKRLASAMGGTVVVLRASE |
| | | GPGDITWTAEVYDRPQGARKALGLSLAAFNSIATAAVDDEGPAPEN |
| | | DDEALEEEAEEALGIATGERIVFFRDPSGAVAGGGWLEASAFWGIA |
| | | NRMVTDRLRELGRLG |
| 112 | Cas12 | MAQASSTPAVSPRPRPRYREERTLVRKLLPRPGQSKQEFRENVKKLR |
| | | KAFLQFNADVSGVCQWAIQFRPRYGKPAEPTETFWKFFLEPETSLP |
| | | PNDSRSPEFRRLQAFEAAAGINGAAALDDPAFTNELRDSILAVASRP |
| | | KTKEAQRLFSRLKDYQPAHRMILAKVAAEWIESRYRRAHQNWERN |
| | | YEEWKKEKQEWEQNHPELTPEIREAFNQIFQQLEVKEKRVRICPAA |
| | | RLLQNKDNCQYAGKNKHSVLCNQFNEFKKNHLQGKAIKFFYKDAEK |
| | | YLRCGLQSLKPNVQGPFREDWNKYLRYMNLKEETLRGKNGGRLPH |
| | | CKNLGQECEFNPHTALCKQYQQQLSSRPDLVQHDELYRKWRREYW |
| | | REPRKPVFRYPSVKRHSIAKIFGENYFQADFKNSVVGLRLDSMPAGQ |
| | | YLEFAFAPWPRNYRPQPGETEISSVHLHFVGTRPRIGFRFRVPHKRS |
| | | RFDCTQEELDELRSRTFPRKAQDQKFLEAARKRLLETFPGNAEQELR |
| | | LLAVDLGTDSARAAFFIGKTFQQAFPLKIVKIEKLYEQWPNQKQAGD |
| | | RRDASSKQPRPGLSRDHVGRHLQKMRAQASEIAQKRQELTGTPAP |
| | | EIIIDQAAKKATLQPFDLRGLTVHTARMIRDWARLNARQIIQLAEE |
| | | NQVDLIVLESLRGFRPPGYENLDQEKKRRVAFFAHGRIRRKVTEKAV |
| | | ERGMRVVTVPYLASSKVCAECRKKQKDNKQWEKNKKRGLFKCEGC |
| | | GSQAQVDENAARVLGRVFWGEIELPTAIP |
| 113 | Cas12 | MNIIMENFEKFVNLYELSKTLRFELIPFSQTKVELEKDWIIEKDREIEEK |
| | | YHIIKEKLDTLH1KFVWQALEWVDLSLLEEYAELYFACKKDTKNKKLKS |
| | | KFEKLEKKIRQEITSFFDAEWNKWKEKYGFLKKWWTSFLTEKEILDVL |
| | | IDIFPENKDDFEIFKWFFTYFSNFNESRKNFYKDEWKAGQIATRAIDE |
| | | NLTTFLENIIKYKNFKKENPDFFTENEEKVFELDFYNFCLTQKWIDNY |
| | | NEIIWAKSLEEWKNTQGVNQRINLLKQKNEKSNKKNLSYPKFDILYK |
| | | QILSEKSENDFIPNIENTEELFTVIQKSIKENDKKITEIDKLFKKFFLEEN |
| | | NIDIWKVYISKQAVNTISSKYFENWSSLWWYLWENSKKKYFSLWEI |
| | | KEALEDIKEKNIFKGEYYNNKIAFENKSNFENFLAIFYYEFQTNLSLLN |
| | | WNQNNLESLQEKEFKKEEKQVDIIKKYFDSVMDLYAMSKYFFVDLK |
| | | QAKNFPKDIEFYNDFDLYFSDYEPWKVYNLVRNFLTKKEVKTDKFKL |
| | | NFSNSQFLTGWDKDKEKERFWVILRKNEKYFLAILKKNNNKIFENYR |
| | | ENNPTDFYEKMEYKQLNNVYRQIPRLGFPLQKKLDSLKWKELEEYLE |
| | | KYKNNFWYNKEIAFIKEEFDIFQKNKEKWEKFDREKLKKLIDYYKKVV |
| | | LEKYSDLYDLKKLENTDYDELVNFYDDVEKSMYSLHFTKIETEFLENLE |
| | | KNWEIYLFQIYNKDFSDYKKENTKENIHTKYFKHLFSEENLENLKIKLS |
| | | GWAEIFFRDKTHNLKQKLDKNWKKMFYWENKDKKVLEHRRYAKD |
| | | SYGFHISITLWANNWDMYKFNQFFNKNFTPKHIIGIDRWEKHLAYY |
| | | SVIDLEGNLVETDTLNIVNGINYLEKLENIEKSRMQERKSWWEIENIK |
| | | NLKDGYISAVVSKLTELIEKYQAIIVFEDLNLGFKRWREKIERQVYQKL |
| | | ELALAKKLNYLTFKNKKDCEIWGVLNGIQLVPRVKDYQDIANYKQSG |
| | | IIFYTNPAYTSTTCPECGWRKTLKFPSKITKTSILEFFKEIQMSFYWEKF |
| | | SFTYENILWKSETLFSNVKRTQWNNKSRKIEHKENITQELKSVFEKYN |
| | | INLWENISEKLQQTDMLLEDLKVLFYNFKLINNIRNSDSKLEEDIISCP |
| | | CCLFNSENWFKGAYFNGDANGAYNTARKGIIMLENIKVNPERSNLF |
| | | VRNEEWDEFLREEF |
| 114 | Cas12 | MSKLFENMTNLYSLNKTLRFELKPVGNTRELIESKDFFKNDEEKAEN |
| | | YQFMKEKMDKIHRNYIQKSLETIKMLPILDQTEQKRLKKEDIKNELKS |
| | | LRSFISAAFVSVKDLLSNKIIEWLISEASIEEKEKIKKFDKFFGYFKTYVQ |
| | | NRGNLYKAEDKAGQIAFRLIDENLPRFFKAKQIIEEIIKKTPDFVVKER |
| | | NEKQEETEKKITEYLSIFYLNSYCHYLSQSGIDLFNEIVGHINLSINLYK |
| | | QKTGVKFSLIPLLYKLPLAPRKQISRLPKQIENPEELELIVKSVLDRIDQ |
| | | KINPFINNILQTVLEENSVYDLNWIYISIKTTEQWWSIGLSGRNSLREL |
| | | GYNQSKNWEEPVLKAEKNKFPFISLGEIKSFLDAKQLAWDDIKSVF |
| | | WEGKSQSLMNWSWSNIFFHLIGKEISSLIEKYLHSRKNYQISQSKEN |
| | | QKHVLDNSLSLWRLLGWFVLMHKKTHLTPEIKESFFYDWENGLDAI |
| | | VFDENSDPIHTIYDKVRNCLTKKPYSNKDKIKVNFDCPYLLWGWDQ |
| | | NYDAFGWLIFHDWKKYFLWLIKGSWLNMEEKNKLYEWINPMNSIT |
| | | KHYDYQKPDFKNVPRLFIRSKWDTFAPMVREYWLPVNDILYLYDNE |
| | | LYKPDKKNPWKHKSYLRRLIDYFKLWLSKHKSFKHYIFKRKESDQYEN |
| | | LAEFYSDVEFSCYAIKKEKVNFDQVKALCESERLYLFEIYNKDYNQFSK |
| | | WKNKNLHTQYFEALFEERDNNLFMLSGGWSIFWRESNWKIVEKIR |
| | | SYSPKYNIEIIDKRRYTKNKLMIHIPIVLNFCRNQEWRVNDMIKSLIQS |
| | | QSNNFTILGIDRWEKHLLYYSLIRQDWTIIKTGSRNTITNKIKIVDYHK |
| | | KLDDREKKRDEAQANWEQQEQIKDLKKWYISQVINEISKMIIEHNAI |
| | | IVLEDLNGWFKRWRQKVEKSIYQQFELALAKKLNHLVFKNRWDTES |
| | | WGTMKAYQLTPLVAQFQDLSFQTWVVFYTPAWYTSTTCPCCGWR |
| | | KNIYFKYENEKQAKIELEKLNIVRENNYFSITYTAEWWNKKWKITWS |
| | | VLNKTDRILTTKWQTRLQYDRASKNTKEYDITTDFNSVFTAKFLDYKI |
| | | RLENAGSKQCRNLINSINLLLKIRNAKSGTDIDTIQCPACEFHSQWW |
| | | FQWNEFNWDANWAYNIARKGKVIIDKIVKGEKNTTVSQIEFDNEIQ |
| | | K |
| 115 | Cas12 | PAYRHPDPLLHPVFCDFGCSRWQICFDVRKNVRTTSPRRLCLTLFTG |
| | | SGMELVPFSWQSKRLARDLALEQRHRNPEASEVTRADRLGRAAAG |
| | | VSAGGAVSIKNIFNEENWNGRLQAPRSQLAAIAARVDKHGWDAK |
| | | ALRMLDRLRWLITFSPRLEPTGPWIEYALRIPDDAAAKPFLSRKNGF |
| | | AVLHRSNDDRKGLAKLILSRLPGLRVLSVDLGHRYAAACAVWETLSA |
| | | DQVREACQAAGHDGPTECDLYLHLKKDGRTVIYRRIGADTLSDGTP |
| | | HPAPWARLDRQFLIKLQGEEHKAREASNAEIWAVHQMEAALGRSV |
| | | PLIDRLVASGWGQRTEGQRARLEALKQLGWRPVAEKLDSDDEPGV |
| | | MEESPAIKPSLSIDELMSSAVRTMRLALKRHGDRARIAHYLITDEKTK |
| | | PGNVKEQLDENGRIELLQDALVLWHDLFSSKGWQDNKAKELWYV |
| | | HIATLPEYKAFQSSGEGHAGPERRGKPEEDREKLGVVAQALAPNVT |
| | | LREALHNAWKKRWEEDDARWKALLRWCKDWILPRGEAANSPAIR |
| | | KVGGLSLIRLATLTEFRRKVQVGFFARLRPDGKKAETGEKFGRKTLDA |
| | | LEELREQRVKQLASRIAEAALGIGKEHVFPTAKEPQKKCWCGSVHRK |
| | | KDPKRPRERVHSPCHAVVIENLTHYRPEETRTRRENRQLMSWSSGK |
| | | VKKYLAEACQLNGLHLREVNAAYTSRQDSRTGAPGIRCQDVPVKEF |
| | | MRSPFWREQVAQAKKKQAEGKGDARERFLCDLDEQWKNRSEDE |
| | | WKKAGPVRVPLRGGEIFVSADGTSPTAKGLHADLNAAANIGLCALT |
| | | DPDWPGRWWYVPCDPASFKPIMDKVEGSAAVQPDQALRQPAQA |
| | | QRGDAARDRKKRGKVGGRSREVVNLWRDVSSRPISPNDSWQEFT |
| | | PYWNDVOARVVNILRQSAGLTRGQGEP |
| 116 | Cas12 | MPLRSINIKMRLKRAAEGRALRQSLWLTHSVVNCAVAEIERVLLLCR |
| | | GRGYWTGDDEPVSAETVQQQALAFARETQARNGQPGIGGDAEIL |
| | | AALRGLYEAIVPSVNRDEQGRPLEGNAQAAGGFAGPMMDAESEG |
| | | FQSVFDKILEPLPSWVAKMTGGTRGWEQESVQWLKSPESERLQHA |
| | | SGSPPAWVRRLRTGEPWQEAFVQDQENKRKEVKGVPSLIQRLKKE |
| | | LGLLPLMRPPITLQFEDKRSGLTPWDRLTLRLAVAHLLSWESWNHR |
| | | AADEHGRVTERLARLETEAAPLASLIEGLREYEKIRHEELKRVAQAND |
| | | ENPFRIGARGVRGWDRVREAWLGATDDTKEGRFTSVAALQ.TKLGG |
| | | RFGDPDLFRWLAEEGREHLWGEHDPLPILARLNALSRLLRRKKDHAI |
| | | YTAPDARLHPRWTAYEAPGGGNLRNYSFEISGNDLALRLPLLRRVES |
| | | GLEEDSQRAEIALAPSGQFQSASWKGDGKPNRHLTYYSAHEQFSAE |
| | | LGGAEILYRRRHLENRKVKELEQGDIGPVWLKLVLDVQPNAPEGWF |
| | | TPRGRVVTPPTVHHFNTALVNRSKHAPDLVPGLRVLAVDLGVRTFA |
| | | ACSVFELVQGEPGNGMAFLADQERDLWARHERSFLLPLPGEAVDS |
| | | QLLAARRAAYNQLGLLRRDLGRLKGILRLSVKETAENRCGSLEELLAS |
| | | LEDEWNRGNAPAIDVAALLSAKGCLEMPQPAWEAAIAGTYQAAER |
| | | ELGNRVRDWRRTTRPRTTGEDDRRQRRGYSGGKSAWAVEYLDOV |
| | | RRLLQGWSLHGRSYAQIRRLDREKMGTFAAGLLDHINALKQDRVKT |
| | | GSDLIVQAARGYLPTGKKGWIKQYEPCRLILFEDLARYRFRTDRPRRE |
| | | NARLMRWNHRQILTETELQAEIFGLLIGTTGAGFSSRFHARSGAPGC |
| | | RTRLLTAEDLRSPTLAKQLELLAETQGIDPKCFRPGMQIPWDSGADF |
| | | VTLDSEGKLVQIHADVNAAQNLQRRFWTRFRDAYRISAVEIKQDGR |
| | | TSWYPDREGVRLRGALSTIVGGDGYARLVAADDDDGFVLEKVTRP |
| | | HWRRAAGAQAESGDDVGLDEVALEMAEAMDTDLERGEGRLVFFR |
| | | DPSGSVIRADRWYQAKAFWGQVRSRVTRALGLRRPGASS |
| 117 | Cas12 | MLDKFASLYPVTKTLRFRLLPQGRTEENMQVAKVLENDLERSEAAA |
| | | VVKGLIKKYHLQFISDTLSGSTLSWQALTETLDKFKADHTATAELDSA |
| | | LAAYRCKLAELFTKSPKYKVMATPVSIIKEILKTETDPENIAALNKLNG |
| | | YTYIIFDYVSTRMLTYSADAKATSLAYRLVDENYLRFYQD1SAAAEISA |
| | | VLEEAGFDNAEVEAFIRTDYNTCLTSEGIASFNAAAGSINQFVNVLL |
| | | QQNPVLQSEPALRRHLQPLYKMLLDEAESKIIKFEDYGQLRDAVENF |
| | | RRNFQDLPQSLIDIFAGRYDYSKIYVGYKYLNEASSQIAGGYNWKLLE |
| | | NALEDFYSKPYLVNGKLPVKYKTVVNKKMNQLAYSFTELQEALDAG |
| | | DSGSSITDLFGKYAELHAAYAAADGNVFYKEYDRKSIASLKNYLDAV |
| | | NAIARFIKIFAAPEVYVKDEGFYGIVDGAADKLRDFDLLYNMVRNYIT |
| | | KKPYKKSKVALTFNSSSFGRGWDENKIYDELTTIFTYNGKYYLGVINK |
| | | NDKPDLAAAVSKDEGGYKRMVYKTFDIVKQLPRLSFTKAVKAHFAE |
| | | SDEDFIFDGPKFAKPLRVPKEIYLQSFTDNGDKLADSAKKYTKAYLD |
| | | MSGDYKGYYEAIIKRIDYTKEFLSAYKSTSIYDLAFLKPAGKAAGSLCW |
| | | TRHI |
| 118 | Cas12 | MSRSIFSPFTNLYPIQKTLRRELKPLNENFQHDPALSALRNSEIPQRD |
| | | EQREKDYQAIKPLLDEFHNQFITESLHSLEPQDRSDFILFYQTYQKKK |
| | | KNKAEISEKELKSLDEEFESRTKALRNAIGTSFSVTAELRKSNPDYVSE |
| | | KGKPFLTQKSYKILTEAGVLWLLEKKYTSDPEKLALIRRFGNFFTYFTG |
| | | FNQNRENYYATDEKSTAVAYRAINENLLTFANNCELFEKLSVLSLSEL |
| | | EKKTFNPDSYSEYLTQSGIVFYNEMLANIRSKANLYTQEHKAKLPQP |
| | | KLLYKQIWSPRGDTIPFDLIASEAEFQETLHTMIRETDQRIPEFNKLLE |
| | | QIFEEKVDLSQIFFSKTSLNIISNRYFSSWHTLLEKGVELKLFKFKKNDE |
| | | ESFKLPAYLSLAELKELLESAPFQMAEKADADEEKHHQASLFKLQRE |
| | | NLHLEKSHSNWELLLKSMKSDFESFWTWEGEFWSYTLAKKALQSLS |
| | | ALESTNQEHKNLIKMLLDNALYAYRMLKWFKVDTSKLGFVPEGEFY |
| | | PSLDQLLQDYPLPKWYDMIRNYLTRKTYSQAKLKLNFDCSTLLNGRD |
| | | KNKEIQNLSVILRKDGKFYLAIMKKDQNKFFENSALYEGNLGTMEK |
| | | MDYKLLPWANKMLPKCLMPGSDKKKYGASDQVLELYAKGSFKKSE |
| | | KSFNLADLHTLIDFYKLALPKYEDWKVFNFQFQATENYQDISQFYRE |
| | | VEQQGYLLNWRKVNEKLIKQGIKDWSLFLFQISSKDFEGKSKTPDLQ |
| | | TLYWQQLFEFSTNVKLNGEAEIFFRPWSMKKEKKKLKVDNYDVFKH |
| | | KRYTEDKILFHVPITLWFGNNEVSPSAPSKFNQKLNQELIIPHFDDLH |
| | | VIGVDRWEKHLAFYSVVSVKTGKIVKQGTLNLLNGTDYEAKLSOKAE |
| | | NRLHARQNRDTIEKIADLKNGYISQVVNKLVELVLEYNAVIVFEDLNA |
| | | GFKRGRQKIEQSVYQKLELALAKKLNFIVKKEKAVGEPWSVTSAYQL |
| | | APQINTFWDIKWKQRGIMLYTRANYTSVTDPLTGWRKQYYFKKGS |
| | | SEEMKAQFFKSFKNLTRDAGQEAYIFDDGTWLLYSNVERRRGKRGD |
| | | HRERTQIKYDPSLELDTLFSKYQJEKSDSLFDQLKNRELPQTFWTSFFR |
| | | IIDLIMQIRNTDDEGRDIILSPIGNPQERFDSRKRYNQLPRDEKGGIIE |
| | | ESAFEYPTSWDANGAYNIARKGVMMLERIKENPEKPDLLIRDAEW |
| | | DKKITRK |
| 119 | Cas12 | MKNFQDFTNLYELSKTLRFELKPIWGTKKLIEEKNILKLDKKKRENYEK |
| | | VKPYFNKIHQEFINFALRNPNFDFSQFEEKYLNWLKDKKNKDLLKEK |
| | | ESIDKIFLEKIWKLFENSVKDFLKENGFESIVKSEDQNLKFFRRKEIFEV |
| | | LQEKYGSELETQMVNKDWEIKSIFNGWEKWLWYFDKFFNTRDNFY |
| | | KTDWTSTAIATRIIKDNLKIFLENTIIFEKVKNKKIDFSEVEKNFSVSIDT |
| | | FFEINNFNNCFLQDWIDFYNKVIWGETLENWEKLKWLNEIINKYRQ |
| | | DTGEKIPYFKKLQKQILSEKDWVFIDKIEDDGGFYEVLKNFYKNAAEK |
| | | EWFLKNIFENFYTISDKNLEKIYFNKIAFNTISHKFWSALEFERILYEEM |
| | | KKEKADWIKFEKKENKYKFPDFIQIIFIKRSLENYDSENLFWKERYYKS |
| | | EENVDWFLEKNNNNIWEQFCKILNFEFLNILKRRIIDEAWEEYEVWF |
| | | EISKNILWEKLENFELNQENKWIIKDFADYSLALYSFWKYFAVEKWR |
| | | NWDLNIDISDDFYGWEDWYIEKFYNTGYDEIVKPYNLMRNYISKKP |
| | | WEDSKKWKINFETSSLLSWWDKNLESNWSYIFQKWNKYYIWIINW |
| | | SKPAKEVLEKLYSWNGEKIKRFIYDFQKPDNKNTPRMFIRSKKDSFSP |
| | | AVGKYNLPVEDILEIYDNWLFKTENKDNSNYKESLSKLIDYFKLGFSK |
| | | HESFKHFNFVWKDSKEYENIADFYRDVEKSCYQITSEFLDFEELKKLT |
| | | FKKHLYLFQIYNKDFELDESLQKNWYNFRDEWQKNIHTKYFEALFLE |
| | | ENILRKSWAVFKLSWGWEVFFRKESIKAEKEKRKNIEVTKNRRYTEE |
| | | KYFLHFPIQVNFKNEISWNFNQEINKFLANNPDINVIWIDRWEKHLA |
| | | YFSVINQKWEILESWSFNKIENYNKNWEKLLFPEREIKEIHKDWSLID |
| | | LELVETWRKVDYVDYKLLLEYKERKRLLQRQSWKEVEQIKDLKKWYI |
| | | SALVRKIADLIIKHNAIVIFEDLNFRFKQIRGWIEKSIYQQLEKALIDKL |
| | | NFLVNKNEINLEKAGSILKAYQLTVPVDSLKEIWKQTWVIFYTEAAYT |
| | | SKIDPIKWWRPNLYLKKQNAEINKENILKFDNIIFNSKENRFEFTYDLK |
| | | KFFWKDSKFPAKTVNTVCSCVERFKWNRNLNNNKWGYIHYENLTD |
| | | WKLANKEQKEDEFSNFKELFEKYFIDINWNILEQIKNLDTKNNEKFFS |
| | | SFIDLFTLVCQIRNTNQNAKWDENDFILSPVEPFFDSRKSQNFWKSL |
| | | PKNWDENWAFNIARKGLIILNRISENPEKPDLLIFNADWDNFARNI |
| 120 | Cas12 | RPGASAALSLTPLKTLFSENFSSFMCGNWQIINDSLKTYYNENIKSKG |
| | | KAKEEKVKKAIKAIEYKSLADINQLVERYNNDELNRKAEEYISAINEKIK |
| | | DLDVNEIEYDEKINLIENETKSEEIKSKLDSIMEIMHWTKMFIIEEEIEK |
| | | DVNFYNEIEEIYDELQPLVTIYNRIRNYVTQKPYSEEKIKLNFGIPTLAN |
| | | GWSKTKEYDNNAIIMIRDGKYYLGIFNAKNKPDKKIMEGHQSEENG |
| | | DYKKMIYRLLPGPNKMLPKVFMSKTGIAEYKPSQYILECYEQNKHIKS |
| | | DKNFDIKFCRDLIDFFKTSINRHPEWSKFNFKFSETSEYEDISTFYREV |
| | | EKQGYKIEWTYISEKEIKELDENGQLYLFQIYNKDFSEKSKGKENLHT |
| | | MYLKNLFSEENLKNIVLKLNGEAEVFFRKSSIKKPIIHKKGSVLVNKTY |
| | | NENGERKSIPEEQYTEIYKYLNSIGTNELSEKSKKLMEEGKVEYYKAN |
| | | YDIVKDYRYSVDKFFIHLPMTINFKAAGFSPINNIALKNIALKDDMHII |
| | | GIDRGERNLIYVSVIDTKGNIVEQRNFNIVNGIDYKEKLKQKELDRDN |
| | | ARKNWKEIGKIKDLKEGYLSLVVHEIAKLVVKYNAIITMEDLNQGFKR |
| | | GRFKVERQVYQKFETMLINKLNYLVDKDLAVDQEGGLLRGYQLTYIP |
| | | ESLKVLGRQCGYIFYVPAAYTSKIDPTTGFVAIFNYKGMTDKDFVTSF |
| | | DSIKYDDERGLFAFEFDYENFVTHKVEMARNKWTVYTYGERIKRKFK |
| | | NGSWDTAEKVDLTYQMRSILEKYEIEYNKGQDILEQIEELDEKAQNG |
| | | ICKEIKYLVKDIVQMRNSLPDNAAEDYDAIISPVINNNGEFFDSTRGD |
| | | EDKPLDADANGAYCIALKGLYEVMQIKKNWNEETEFPRKELKIRHQ |
| | | DWLDFIQNKRYL |
| 121 | Cas12 | MQCGSLRHNSKSLDSALAYPARLTTGGNEGKTSEAHIENDSLPEITR |
| | | RPSRLARDFAPSNPFPFMKRIYQGQITGMQFHGAAGEQAVPANQ |
| | | NWEQALWDHHGLFHDAVNYYLVCLLALARPGNPVYAIREKLDAHN |
| | | GAEPDELMVWRTFRRRGCNRPGLRDSVAKYLTPGNDEPTTEECFA |
| | | AVLAGNPLGATEEGRAILNEGLAQLLGKCTGESGCRNSAKEYLPRFT |
| | | KPDFKGNFEEDTARLNRAEASKRLPFYLHDPATTPNSPALDEFGVLSI |
| | | ALPNPKRAELTGAEARDKLLEFSREWSARLPDGSADWRRLEAKITAL |
| | | GDSLAIPGYTSGSAKGENRFQLYAMFLFCFVEKSDFTLGLLRQTTRR |
| | | PVEGEEPPPRSNHSATAGDPIRIARGGRGYVFRAFTSLKQWGGDTG |
| | | GDLKWPKFDMAAFCEALKALHQVEAKAKQRAEERSKKQALLDYQR |
| | | GRIRRFKPTANSEDATPPPVLAGDPRISRLEQLLNTDLQDEYEMSEG |
| | | VAVAYGLHPRTIRGFREIRKRWISAVGNAPFSEAARATLIACVRSFQS |
| | | ENPGTVGSARLFEALAEESNWIIWREPSAAEQQSWRENADLPESAE |
| | | FALDPLQALTDERELKDEIERLSGPIRFTPADAEHSRRQFYFSDVSQID |
| | | KRNRFRPRLNEVEVELAVRPNGHWTNVWVTLQYSAPRLLRDQLPT |
| | | ADEAGGGWQQAMMAALNLRAPLKKGGEAVSFADCAALSLMPDI |
| | | SPDGEKRLLLNFPVELDGEAIANQLGRSKRWETLQFGGADDESYWL |
| | | RWPKTWIDETKVRRKAAPPKWWLSKEPFSVLGVDLGQRDAAACA |
| | | LVQVSPGNCPTGVCRHVGSADGVDWWATVRSMNMLRLPGENA |
| | | KVMRDGRFQEELSGSRGRSASIDELKEAGDICARLGFVADTILGANG |
| | | RALSFPELNDRLLFSLRSAQSRLARLQSWSCVAHADVPPARREGILR |
| | | DISEAKDDPLGLKPLATAGNLEAIASTLREVILQERTSISAQLVRVADR |
| | | ILPLRGRRWEWVARPESPSNHMLRATAPDTDPRRKLVAGQRGLSL |
| | | ARVEQLESLRQRCQSLNRALMQVPGTPSKLGRRSRGVELPDPCPDL |
| | | LDRLDALKEQRVNQTAHLILAQALGVRLRIHQVSGPQRTRSDSHGE |
| | | YERIPGREPVDFLVLENLDRYLASQGRSRSENSRLMKWCHRAILLKL |
| | | KQLCEPYGLRVLETPAAYSSKFSSRDGTAGFRAVEVTPDDLGSHRW |
| | | RKHSERLADPGASLSRDEREESTRLMAFAERLKALNQDLIARQEAAR |
| | | SSNQPFRPKWRTLLAPQQLGPIFVPAVGKPLQADINAAINIALRAIAS |
| | | PDVDDIHLRIRAARSGDKFVVRAENTRERARWGSAEAEIGLPTGAG |
| | | AKEIEERRSLLTEARVNFFFDPASVAAFDHGKVRDAKLAVTSGRGLW |
| | | GTLRREEWAIVGKINNDRLAAHGLGRPFAERVDL |
| 122 | Cas12 | MSQRDPLPSPTPRAYTLRLSTPDADNGAWRERLWKTHEVVNSGAE |
| | | AFGDWLLSLRGGLDHRLVAVKVRVGRGASKTEREPTEDERRERRIVL |
| | | ALCWLSVESKKGAPQGRVVEDPVDALKRILGQRGLSEADAEQWVF |
| | | DCRDSLSATIRDDATWVDRSAAFDETVQRLGSSLTREHAEQVIIEFF |
| | | GDIHDYLALPKNMEEDGVTSPRGGSGKEFRTQARSWLSENWGAG |
| | | QKGDKAQIVDALRKCSRCIAQEKPSTGSDLLRVLVRSLGGSPEETLRF |
| | | DELRKLVGWRTGRRSTGAFALQRTVDMDRLSESDLESLEAKLTVEID |
| | | AKSPEASRSVPQWVESMRTAVEREVGMPFRSTRDLIGEFGVMLDH |
| | | AARRVSATHSWIKRAEAERRKFEGDAAKLAQIPEEARQWLDQFCE |
| | | DRSQELNALEPYRIRRRAVEGWESVVRTWAKADCKAEGDRVKAVR |
| | | ALQPEIEKFGDAALFEALAAEDALCVWLLDGKATPRPLLDYSAATDA |
| | | QYRKRRFKVPAYRHPDALLHPVFCDFGESRWTIEFSAHRALGRRRK |
| | | AQQLVDNKTVALQKAQERLRKAKAESSRSRAEEKVRAAEHALEAAR |
| | | KKLAFLQYRRALAVCLWTGKGVESTSLRWHSKRFAKDFAIGSSPED |
| | | GASTGVPVARADRLGRASANVPRGASVTISGVFEQKEWNGRLOAP |
| | | RDALNAIAKVRDDETLPAADRSRRVQQMLSRLPWFVTFSARLVPQ |
| | | GPWLDYASEHSALGLRVDPKYWPHAEENRQRKGMARLILSRLPSLR |
| | | VLSVDLGHRYAAACAVWETLSAQEMQRICREMGSAPPSPDDLYLH |
| | | LRRADGNGKQRTTVYRRIGPDTLPDGGQHPAPWARLDRQFLIKLQ |
| | | GEDESARKASDSEIAVVKKFEADLGRPAMQRRSLRVDDLMSAAVRT |
| | | ARLALRRHGDRARIAFNLIADRRFRPGGAEEPLTDETRVDLLADTLA |
| | | TWHGLFSGGQCHDERAEEQWNEHIAPLLASSGASLSVPSDGDAVA |
| | | ATPARRRRKEVRGKLVPAAMELARRDLSQLSVLWVARWHQDDES |
| | | WRARLRWLRDWILPRGAKADSGAIRHVGGLSVTRLATIRSLWOLQ |
| | | KAYRTQPEPEDPRKNVPKKGDTSLDDFGRTILDDLEHLRENRVKQLA |
| | | SRICEAALGVGVEQPNGGAKDPKRPQERRFSPCQAVVIENLTRYRP |
| | | EETRTRRENRQLLNWSAGKVKQYLSEACELHGLHLREVSAAYTSRQ |
| | | DSRTGAPGIRCQDIPVVDFVRENGPCWGRLRSAQQSSGGTAEDQL |
| | | LLALYERWSEKERTWRDQSGNVWAMDGEGRWVARNGTOLPOG |
| | | SGLTPHPIRVPQRGGDIFVSAAPRSPAANGIQADLNAAANIGLWAL |
| | | LDPDWEGRWWRLPCSAMDLKPVKGSVNGSAVIHLDAPLKAAATK |
| | | GAAKKDVVNLWRDISVRSLTEGVWRGYDAYWNLARYRVVQTLRP |
| | | QVGIGSDE |
| 123 | Cas12 | MFKGDAFTGLYEVQKTLRFELVPIGLTQSYLENDWVIQKDKEVEENY |
| | | GKIKAYFDLIHKEFVRQSLENAWLCQLDDFYEKYIELHNSLETRKDKN |
| | | LAKQFEKVMKSLKKEFVSFFDAKWNEWKQKFSFLKKWWIDVLNEK |
| | | EVLDLMAEFYPDEKELFDKFDKFFTYFSNFKESRKNFYADDGRAWAI |
| | | ATRAIDENLITFIKNIEDFKKLNSSFREFVNDNFSEEDKQIFEIDFYNNC |
| | | LLQPWIDKYNKIVWWYSLENWEKVQWLNEKINNFKQNQNKSNSK |
| | | DLKFPRMKLLYKQILGDKEKKVYIDEIRDDKNLIDLIDNSKRRNQIKID |
| | | NANDIINDFINNNAKFELDKIYLTRQSINTISSKYFSSWDYIRWYFWT |
| | | GELQEFVSFYDLKETFWKIEYETLENIFKDCYVKGINTESQNNIVFETQ |
| | | GIYENFLNIFKFEFNQNISQISLLEWELDKIQNEDIKKNEKQVEVIKNY |
| | | FDSVMSVYKMTKYFSLEKWKKRVELDTDNNFYNDFNEYLEGFEIWK |
| | | DYNLVRNYITKKQVNTDKIKLNFDNSQFLTWWDKDKENERLGIILRR |
| | | EWKYYLWILKKWNTLNFGDYLQKEWEIFYEKMNYKQLNNVYRQLP |
| | | RLLFPLTKKLNELKWDELKKYLSKYIQNFWYNEEIAQIKIEFDIFQESKE |
| | | KWEKFDIDKLRKLIEYYKKWVLALYSDLYDLEFIKYKNYDDLSIFYSDV |
| | | EKKMYNLNFTKIDKSLIDGKVKSWELYLFQIYNKDFSESKKEWSTENI |
| | | HTKYFKLLFNEKNLQNLVVKLSWWADIFFRDKTENLKFKKDKNGQEI |
| | | LDHRRFSQDKIMFHISITLNANCWDKYWFNQYVNEYMNKERDIKII |
| | | WIDRWEKHLAYYCVIDKSWKIFNNEIWTLNELNWVNYLEKLEKIESS |
| | | RKDSRISWWEIENIKELKNGYISQVINKLTELIVKYNAIIVFEDLNIWFK |
| | | RWRQKIEKQIYQKLELALAKKLNYLTQKDKKDDEILWNLKALQLVPK |
| | | VNDYQDIWNYKQSWIMFYVRANYTSVTCPNCWLRKNLYISNSATK |
| | | ENQKKSLNSIAIKYNDWKFSFSYEIDDKSWKQKQSLNKKKFIVYSDIE |
| | | RFVYSPLEKLTKVIDVNKKLLELFRDFNLSLDINKOIQEKDLDSVFFKSL |
| | | THLFNLILQLRNSDSKDNKDYISCPSCYYHSNNWLQWFEFNWDAN |
| | | WAYNIARKGIILLDRIRKNQEKPDLYVSDIDWDNFVQSNQFPNTIIPI |
| | | QNIEKQVPLNIKI |
| 124 | Cas12 | MLSFNWVLFFFFSKMSRSIFSPFTNLYPIQKTLRRELKPLNENFQHDP |
| | | ALSALRNSEIPQRDEQREKDYQAIKPLLDEFHNQFITESLHSLEPQDR |
| | | SDFILFYQTYQKKKKNKAEISEKELKSLDEEFESRTKALRNAIGTSFSVT |
| | | AELRKSNPDYVSEKGKPFLTQKSYKILTEAGVLWLLEKKYTSDPEKLAL |
| | | IRRFGNFFTYFTGFNQNRENYYATDEKSTAVAYRAlNENLLTFANNC |
| | | ELFEKLSVLSLSELEKKTFNPDSYSEYLTQSGIVFYNEMLANIRSKANLY |
| | | TQEHKAKLPQPKLLYKQIWSPRGDTIPFDLIASEAEFQETLHTMIRET |
| | | DQRIPEFNKLLEQIFEEKVDLSQIFFSKTSLNIISNRYFSSWHTLLEKGV |
| | | ELKLFKFKKNDEESFKLPAYLSLAELKELLESAPFQMAEKADADEEKH |
| | | HQASLFKLQRENLHLEKSHSNWELLLKSMKSDFESFWTWEGEFWS |
| | | YTLAKKALQSLSALESTNQEHKNLIKMLLDNALYAYRMLKWFKVDTS |
| | | KLGFVPEGEFYPSLDQLLQDYPLPKWYDMIRNYLTRKTYSQAKLKLN |
| | | FDCSTLLNGRDKNKEIQNLSVILRKDGKFYLAIMKKDQNKFFENSALY |
| | | EGNLGTMEKMDYKLLPWANKMLPKCLMPGSDKKKYGASDQVLEL |
| | | YAKGSFKKSEKSFNLADLHTLIDFYKLALPKYEDWKVFNFQFQATEN |
| | | YQDISQFYREVEQQGYLLNWRKVNEKLIKQGIKDWSLFLFQISSKDF |
| | | EGKSKTPDLQTLYWQQLFEFSTNVKLNGEAEIFFRPWSMKKEKKKL |
| | | KVDNYDVFKHKRYTEDKILFHVPITLWFGNNEVSPSAPSKFNQKLN |
| | | QELIIPHFDDLHVIGVDRWEKHLAFYSVVSVKTGKIVKQGTLNLLNG |
| | | TDYEAKLSQKAENRLYARQNRDTIEKIADLKNGYISQVVNKLVELVLE |
| | | YNAVIVFEDLNAGFKRGRQKIEQSVYQKLELALAKKLNFIVKKEKAVG |
| | | EPWSVTSAYQLAPQINTFWDIKWKQRGIMLYTRANYTSVTDPLTG |
| | | WRKQYYFKKGSSEEMKAQFFKSFKNLTRDAGQEAYIFDDGTWLLYS |
| | | NVERRRGKRGDHRERTQIKYDPSLELDTLFSKYQIEKSDSLFDQLKNR |
| | | ELPQTFWTSFFRIIDLIMQIRNTDDEGRDIILSPIGNPQERFDSRKRYN |
| | | QLPRDEKGGIIEESAFEYPTSWDANGAYNIARKGVMMLERIKENPE |
| | | KPDLLIRDAEWDKKITRK |
| 125 | Cas12 | MLDKFASLYPVTKTLRFRLLPQGRTEENMQVAKVLENDLERSEAAA |
| | | WKGLIKKYHLQFISDTLSGSTLSWQALTETLDKFKADHTATAELDSA |
| | | LAAYRCKLAELFTKSPKYKVMATPVSIIKEILKTETDPENIAALNKLNG |
| | | YTYIIFDYVSTRMLTYSADAKATSLAYRLVDENYLRFYQD1SAAAEISA |
| | | VLEEAGFDNAEVEAFIRTDYNTCLTSEGIASFNAAAGSINQFVNVLL |
| | | QQNPVLQSEPALRRHLQPLYKMLLDEAESKIIKFEDYGQLRDAVENF |
| | | RRNFQDLPQSLIDIFAGRYDYSKIYVGYKYLNEASSQIAGGYNWKLLE |
| | | NALEDFYSKPYLVNGKLPVKYKTVVNKKMNQLAYSFTELQEALDAG |
| | | DSGSSITDLFGKYAELHAAYAAADGNVFYKEYDRKSIASLKNYLDAV |
| | | NAIARFIKIFAAPEVYVKDEGFYGIVDGAADKLRDFDLLYNMVRNYIT |
| | | KKPYKKSKVALTFNSSSFGRGWDENKIYDELTTIFTYNGKYYLGVINK |
| | | NDKPDLAAAVSKDEGGYKRMVYKTFDIVKQLPRLSFTKAVKAHFAE |
| | | SDEDFIFDGPKFAKPLRVPKEIYLQSFTDNGDKLADSAKKYTKAYLD |
| | | MSGDYKGYYEAIIKRIDYTKEFLSAYKSTSIYDLAFLKPAGKAAGSLCW |
| | | TRHI |
| 126 | Cas12 | MNRIYQGRVTKVEILNGKNADGQPQELPNWQTALWQHHELFQD |
| | | AVNYYLFCLAALASSASSPMGKLRNQLGSVWEPFGRTGRRFKGLRD |
| | | SVGPYLLPDRPTPSIEEAFAAALAGNNSQPELLQLAVDALVEDLGGD |
| | | AAIQQEGRGYLPRLCSPAYNGQFPRGANSLQKEAAKIRLPTLLHNVA |
| | | TSRNLDALAAELEFGFFANPVPNAGPIAGQEARNKLLEALAWLKAK |
| | | DTRLTHSANELEKRIGVLPDSVSFPTYSGGSINKEALKHRFFAYLLFQ |
| | | HVERSLVTFEILRDSYPTPKPSARKSSKATPDTMAQLTQFGDDPVKL |
| | | ARGTRGYVFRAFTSLPCWGAKAPSDILWSEFDIAAFKEALKTANQFR |
| | | LKTKERLDKADELAGELAWMNGEKSKFKPSEHSEQEPPAVLKGDPR |
| | | FEVLKQLFEVELAEEHYLAEGESVIYGLHPRTLRCYRELVERWNKTVQ |
| | | PGEVFTEATSKKLVASTDKFQAENKERIGSVTLFKKLLERDYWCLWQ |
| | | TPDVQTVAARQKAGFSSNIIEDYQRYLELQTDIARLKEPIRFTPADAE |
| | | QSRRLFMFSDLAGKSKHKHLPNATPYGFAVDVALAASEGGVWKET |
| | | RVRLHYSAPRLRRDGLRKGVGEDLKRTAWLQPMVAALNLSEPAPQ |
| | | DFSKCAVSLMPDKSWKGLRHLLNFPVTLDPTVVQKAIGSQARWAN |
| | | QFVAFGKGATEQKFFLRWPEEVSASQKKAGPWWDALRAFSCLSVD |
| | | LGQRDAGAFALLDVRANADWGKKPSRFIGEADGRNWRAALAAAG |
| | | LLRLPGEDALVWRDGKWQEELYGEKGRLATKEEWLETNAIFSALEQ |
| | | NSEEWIGADPKRRSFPELNSKLLVVARRGQSWLARLHRWLWMLG |
| | | DENKRERALRELLEQERQEAWRKRAEGKDLLALKQSLTAEIQRLNGL |
| | | LPEQLVFLANRCLPLRNRKWAWNQHPDKAFAEKGCHLLEMVEAPS |
| | | HLPLLAGQRGISFERIGQLEELRRRFQSLNRVLQRELGAPPKSGRELR |
| | | DDLVPDCCPDILAKLDRVKEQRVNQTAHLIVAQVLGVQLRKHQTPE |
| | | SERTERDLHGEYEIMPGRKPVDFIVLEDLSKYLSSQARGRGENVRLM |
| | | KWCHRQVTAKVKELCEPFGLPVLETPAAYSSKFCSRTGVAGFRGVE |
| | | VTLKDRQSFPWSKRLEEDSAEVAELFGWLETASAGHKTKQPRCLLA |
| | | PMSLGPLFIPVTSQAPIMQADINAAINLGLRAMAAPSVHEIHVRIRS |
| | | EAKDGQFRVRAQSKREKARWGNEPPPIKMLVETQRVALAREGGH |
| | | PNFFVDPLKAATFDRAEVEGLGLPVASGRGLWKSVRDAEWKRCREI |
| | | NLERMRRWGFIMEAPRTLQVSRKEDEDDLTF |
| 127 | Cas12 | MAVRSVKLKLLVPRDGSAESVRKRKALWATHQFVNDAAAAYAELLL |
| | | EMRQEDVCRGTDDHGKDVIEPAAHWQAKLRARLAAKQLPPVAVA |
| | | EALPLLKAFYGSRLIKSFVANDKGVAGTGNATDLNTWLSGLVDPASV |
| | | AGEKTELRKQLLAELPLCEAADADFEGAARKMLAKSDAREALLEGP |
| | | GTGVGWPAAYNANPTDSVWLDMLHKAAAKARLELADTTVSELKK |
| | | LGVFPLLQAASSNRVFGSGVLNPFERMAAAQAAAALLPWETKRHE |
| | | MRKRRDKFADQLNQWDTEFGASHATALAAIRAFEAEESERARRESL |
| | | GNEGTGYRIGGRELRDAWTLLRDWLKGHSTATAAAREDKVRELQA |
| | | KQGRSFGSHRLLSWLAKPAQQWLADHSAGDVVTRIAVRNARQRK |
| | | LDTARTLPIWTGADAVKHPRFANFDPPNNTNQPGFDLRAGTOKGR |
| | | LTLRLSLLTERADGLLLAQDHDFQLVPSRQMAEIVLHKDGKERALSW |
| | | QSQDGIGRQVGDVGGSALLFSRDHAECLLERKQITRLERGAWPAAL |
| | | PVWFKLSLDIGAEHKALLKQRFKWGVWLNSALVTRNAKDAKGVPP |
| | | PVGTRVLAVDLGLRSAATVSVWQVVDAATPVVAGKWRVPLSDTLS |
| | | AVHERSAMLALPGEHVDAGVLAARRAANEKLAGLLAATSHLSTVFK |
| | | LGRAEQGDRRRELLERLGEGDDRRARAAVATTAAERDGLRAVLGA |
| | | TQDAWAGAVAAVWRRLETDLAGAIAAYRKQQREDVQLRREARHG |
| | | PGASQLPKQAAAERLLGGKSAWQIEYKERVRKLLTRWIMRQRPGD |
| | | TAVRRLARKDLGKYCGGLLDHLTALKEDRAKTTADLIVQAARGRVR |
| | | AHKDAHGRQQDRELWLAKYAPCDLIVMEDLGRYRFATDRPPSENR |
| | | QLMQWTHREVFRLVQMQAEVEGIQVLETGAEFSSKFDARTWAPG |
| | | VRCEPITKLWVERYRNGEMPWLADKADEWRREGIELAQLVPGQLL |
| | | PTGSGEQFVAVSATGGLRVRHADLNAAQCIALRALTGHGTAFRLTA |
| | | RRLGDVFVSAKGLGKRPQGALWREFGSALPPAVVVLRPAGEVRYAL |
| | | RPFASARDAAAALGLQLGALRNVDATDAESDAEDGDLAELLAGAD |
| | | PDRATFFRDPSGDVHGGAWVQAKVFWAEVRRHVRLGLQAQGLLP |
| | | AAARSSEPRQMQLPLAGALPGDDIPL |
| 128 | Cas12 | MSTQKNPFNQFTNLYELQKTLRFELRPVPETKKLLEKGEGKNLIQMD |
| | | LEIDRLYEKEMKPMFNILHEKFINESLGLVKLDCKKLKKLENLLAEADK |
| | | LRKQIKEGRKNKNNISEVEKRLKIIIGDNSQGKNKNGEIAVLQDELRV |
| | | LIVKAFNLTADKWKKELNNKETLLPEKKGKRKIKIKKSGPKILQEENVL |
| | | AILAYFNPDKADIIKKFAGFFTYFSGFNQNRANYYTVKALATGVANR |
| | | AINRNFLIFLANRKDFARFKERLPRLAEFDNYFELENYEKYLSQ.TGIEE |
| | | YNDQIGKIKQIVNLEHNQQQKDNKFQLKGLATLEKQIGCRTKKQRE |
| | | EGGDKSAPKFLEKVGLGFQVSQDDDGEYLIWECLNYINKELAGKLKS |
| | | IKDNYQKFFADWRTGAYDLEKIWFRKEALNTISGRWFGGNNWFIIG |
| | | KALALTGVGKFDKRENTYKIPEFVSLAEIKTAFEMLENGVNYDFKKSK |
| | | KKKEGDDTDVVKYSADNLFKEEYKKKGLIKNSLFETMLAVWQSEIKR |
| | | KFEQIFDGYKLEKDDVFGRKKGEWVEPFIENFQKVSQEKFDRGVKD |
| | | ENGRSIHTEVVKNLIEEGYLRLFQLTKYHNLDKKGERDPRPFDGNFY |
| | | ATLDEFWKDNIVVVYHKALQSTLTKKPYSEDKIKLNFENGSLLGGFS |
| | | DGQERSKAGVVLKNKNKFYLGILIDRGFFRTDKANPVYDNAQNNE |
| | | WERLILTNLKFQTLAGKGFLGKHGVSYGEMGKDNPMMAVEYLQKF |
| | | IKLKYLDKYPALNEVAHKKYTIKKEFDADVKNALKDCFTMNFKPVDF |
| | | GMIRQGLTESLFYLFEIVNKDISSQAKNGKNVHTLYWEALFGDQNLK |
| | | KPILALNGGAEIFYRESQREKLEKKLDKSGKEVLDHKRYGQDKYFLHA |
| | | SITINYGQPKNIKFKEVINEKISQNADRVNIIGIDRGEKHLLYYSVVSPE |
| | | GVLLEQGSFNQIETKNKVDIKAVKAEYGERGELKKVELVPTGKKVKY |
| | | VDYQILLDYYEKKRNLARRDWQTIGKIKDLKDGYLSQTVHRIYQLILK |
| | | YNAVVAMEDLNVEFKAKRAAKVEKSVYKNFEMALAKKLNHLILKDR |
| | | RADEIGGALRAYQLTPAIPANDVGKFDKAKQWGIMFYVRANYTSTT |
| | | DPLTGWRKHKYISNSEKIDNIQKFFSPGDGIQIDYDTEKQCFKFSYDH |
| | | ELEGGAKKHWELFACDGLERFYWDNRERQIKKYNLYEEFEKLLGGL |
| | | RKEENINIQIDGVSEFRWKDLVFFWNLLNQIRNTDRSAQGDENDFL |
| | | QSPVWSEKYNCFYDSRKAPNNMPNNGDANGAFNIARKGQLILERI |
| | | KKCSDIPKFGNDNNGKNPENNYFISDADWDKFAQK |
| 129 | Cas12 | MAVKSIKVKLRLDDMPEIRAGLWKLHKEVNAGVRYYTEWLSLLRQE |
| | | NLYRRSPNGDGEQECDKTAEECKAELLERLRARQVENGHRGPAGS |
| | | DDELLQLARQLYELLVPQAIGAKGDAQQIARKFLSPLADKDAVGGL |
| | | GIAKAGNKPRWVRMREAGEPGWEEEKEKAETRKSADRTADVLRAL |
| | | ADFGLKPLMRVYTDSEMSSVEWKPLRKGQAVRTWDRDMFQQAIE |
| | | RMMSWESWNQRVGQEYAKLVEQKNRFEQKNFVGQEHLVHLVN |
| | | QLQQDMKEASPGLESKEQTAHYVTGRALRGSDKVFEKWGKLAPDA |
| | | PFDLYDAEIKNVQRRNTRRFGSHDLFAKLAEPEYQALWREDASFLTR |
| | | YAVYNSILRKLNHAKMFATFTLPDATAHPIWTRFDKLGGNLHQYTFL |
| | | FNEFGERRHAIRFHKLLKVENGVAREVDDVTVPISMSEQLDNLLPRD |
| | | PNEPIALYFRDYGAEQHFTGEFGGAKIQCRRDQLAHMHRRRGARD |
| | | VYLNVSVRVQSQSEARGERRPPYAAVFRLVGDNHRAFVHFDKLSDY |
| | | LAEHPDDGKLGSEGLLSGLRVMSVDLGLRTSASISVFRVARKDELKP |
| | | NSKGRVPFFFPIKGNDNLVAVHERSQLLKLPGETESKDLRAIREERQR |
| | | TLRQLRTQLAYLRLLVRCGSEDVGRRERSWAKLIEQPVDAANHMTP |
| | | DWREAFENELQKLKSLHGICSDKEWMDAVYESVRRVWRHMGKQ |
| | | VRDWRKDVRSGERPKIRGYAKDVVGGNSIEQIEYLERQYKFLKSWS |
| | | FFGKVSGQVIRAEKGSRFAITLREHIDHAKEDRLKKLADRIIMEALGY |
| | | VYALDERGKGKWVAKYPPCQLILLEELSEYQFNNDRPPSENNQLMQ |
| | | WSHRGVFQELINQAQVHDLLVGTMYAAFSSRFDARTGAPGIRCRR |
| | | VPARCTQEHNPEPFPWWLNKFVVEHTLDACPLRADDLIPTGEGEIF |
| | | VSPFSAEEGDFHQIHADLNAAQNLQQRLWSDFDISQIRLRCDWGE |
| | | VDGELVLIPRLTGKRTADSYSNKVFYTNTGVTYYERERGKKRRKVFA |
| | | QEKLSEEEAELLVEADEAREKSVVLMRDPSGIINRGNWTRQKEFWS |
| | | MVNQRIEGYLVKQIRSRVPLQDSACENTGDI |
| 130 | Cas12 | MSTQKNPFNQFTNLYELQKTLRFELRPVPETKKLLEKGEGKNLIQMD |
| | | LEIDRLYEKEMKPMFNILHEKFINESLGLVKLDCKKLKKLENLLAEADK |
| | | LRKQIKEGRKNKNNISEVEKRLKIIIGDNSQGKNKNGEIAVLQDELRV |
| | | LIVKAFNLTADKWKKELNNKETLLPEKKGKRKIKIKKSGPKILQEENVL |
| | | AILAYFNPDKADIIKKFAGFFTYFSGFNQNRANYYTVKALATGVANR |
| | | AINRNFLIFLANRKDFARFKERLPRLAEFDNYFELENYEKYLSQTGIEE |
| | | YNDQIGKIKQIVNLEHNQQQKDNKFQLKGLATLEKQIGCRTKKQRE |
| | | EGGDKSAPKFLEKVGLGFQVSQDDDGEYLIWECLNYINKELAGKLKS |
| | | IKDNYQKFFADWRTGAYDLEKIWFRKEALNTISGRWFGGNNWFIIG |
| | | KALALTGVGKFDKRENTYKIPEFVSLAEIKTAFEMLENGVNYDFKKSK |
| | | KKKEGDDTDVVKYSADNLFKEEYKKKGLIKNSLFETMLAVWQSEIKR |
| | | KFEQIFDGYKLEKDDVFGRKKGEWVEPFIENFQKVSQEKFDRGVKD |
| | | ENGRSIHTEVVKNLIEEGYLRLFQLTKYHNLDKKGERDPRPFDGNFY |
| | | ATLDEFWKDNIVVVYHKALQSTLTKKPYSEDKIKLNFENGSLLGGFS |
| | | DGQERSKAGVVLKNKNKFYLGILIDRGFFRTDKANPVYDNAQNNE |
| | | WERLILTNLKFQTLAGKGFLGKHGVSYGEMGKDNPMMAVEYLQKF |
| | | IKLKYLDKYPALNEVAHKKYTIKKEFDADVKNALKDCFTMNFKPVDF |
| | | GMIRQGLTESLFYLFEIVNKDISSQAKNGKNVHTLYWEALFGDQNLK |
| | | KPILALNGGAEIFYRESQREKLEKKLDKSGKEVLDHKRYGQDKYFLHA |
| | | SITINYGQPKNIKFKEVINEKISQNADRVNIIGIDRGEKHLLYYSVVSPE |
| | | GVLLEQGSFNQIETKNKVDIKAVKAEYGERGELKKVELVPTGKKVKY |
| | | VDYQILLDYYEKKRNLARRDWQTIGKIKDLKDGYLSQTVHRIYQLILK |
| | | YNAVVAMEDLNVEFKAKRAAKVEKSVYKNFEMALAKKLNHLILKDR |
| | | RADEIGGALRAYQLTPAIPANDVGKFDKAKQWGIMFYVRANYTSTT |
| | | DPLTGWRKHKYISNSEKIDNIQKFFSPGDGIQIDYDTEKQCFKFSYDH |
| | | ELEGGAKKHWELFACDGLERFYWDNRERQIKKYNLYEEFEKLLGGL |
| | | RKEENINIQIDGVSEFRWKDLVFFWNLLNQIRNTDRSAQGDENDFL |
| | | QSPVWSEKYNCFYDSRKAPNNMPNNGDANGAFNIARKGQLILERI |
| | | KKCSDIPKFGNDNNGKNPENNYFISDADWDKFAOK |
| 131 | Cas12 | MAIRSIKLKLKTHTGPEAQNLRKGIWRTHRLLNEGVAYYMKMLLLF |
| | | RQESTGERPKEELQEELICHIREQQQRNQADKNTQALPLDKALEALR |
| | | QLYELLVPSSVGQSGDAQIISRKFLSPLVDPNSEGGKGTSKAGAKPT |
| | | WQKKKEANDPTWEQDYEKWKKRREEDPTASVITTLEEYGIRPIFPLY |
| | | TNTVTDIAWLPLQSNQFVRTWDRDMLQQAIERLLSWESWNKRVQ |
| | | EEYAKLKEKMAQLNEQLEGGQEWISLLEQYEENRERELRENMTAA |
| | | NDKYRITKRQMKGWNELYELWSTFPASASHEQYKEALKRVQQRLR |
| | | GRFGDAHFFQYLMEEKNRLIWKGNPQRIHYFVARNELTKRLEEAKQ |
| | | SATMTLPNARKHPLWVRFDARGGNLQDYYLTAEADKPRSRRFVTF |
| | | SQLIWPSESGWMEKKDVEVELALSRQFYQQVKLLKNDKGKQKIEFK |
| | | DKGSGSTFNGHLGGAKLQLERGDLEKEEKNFEDGEIGSVYLNVVIDF |
| | | EPLQEVKNGRVQAPYGQVLQLIRRPNEFPKVTTYKSEQLVEWIKASP |
| | | QHSAGVESLASGFRVMSIDLGLRAAAATSIFSVEESSDKNAADFSYW |
| | | IEGTPLVAVHQRSYMLRLPGEQVEKQVMEKRDERFQLHQRVKFQI |
| | | RVLAQIMRMANKQYGDRWDELDSLKQAVEQKKSPLDQTDRTFWE |
| | | GIVCDLTKVLPRNEADWEQAVVQIHRKAEEYVGKAVQAWRKRFAA |
| | | DERKGIAGLSMWNIEELEGLRKLLISWSRRTRNPQEVNRFERGHTS |
| | | HQRLLTHIQNVKEDRLKQLSHAIVMTALGYVYDERKQEWCAEYPAC |
| | | QVILFENLSQYRSNLDRSTKENSTLMKWAHRSIPKYVHMQAEPYGI |
| | | QIGDVRAEYSSRFYAKTGTPGIRCKKVRGQDLQGRRFENLQKRLVN |
| | | EQFLTEEQVKQLRPGDIVPDDSGELFMTLTDGSGSKEVVFLQADINA |
| | | AHNLQKRFWQRYNELFKVSCRVIVRDEEEYLVPKTKSVQAKLGKGLF |
| | | VKKSDTAWKDVYVWDSQAKLKGKTTFTEESESPEQLEDFQEIIEEAE |
| | | EAKGTYRTLFRDPSGVFFPESVWYPQKDFWGEVKRKLYGKLRERFL |
| | | TKAR |
| 132 | Cas12 | MRKKLFKGYILHNKRLVYTGKAAIRSIKYPLVAPNKTALNNLSEKIIYD |
| | | YEHLFGPLNVASYARNSNRYSLVDFWIDSLRAGVIWQSKSTSLIDLIS |
| | | KLEGSKSPSEKIFEQIDFELKNKLDKEQFKDIILLNTGIRSSSNVRSLRG |
| | | RFLKCFKEEFRDTEEVIACVDKWSKDLIVEGKSILVSKQFLYWEEEFGI |
| | | KIFPHFKDNHDLPKLTFFVEPSLEFSPHLPLANCLERLKKFDISRESLLG |
| | | LDNNFSAFSNYFNELFNLLSRGEIKKIVTAVLAVSKSWENEPELEKRL |
| | | HFLSEKAKLLGYPKLTSSWADYRMIIGGKIKSWHSNYTEQLIKVREDL |
| | | KKHQIALDKLQEDLKKVVDSSLREQIEAQREALLPLLDTMLKEKDFSD |
| | | DLELYRFILSDFKSLLNGSYQRYIQTEEERKEDRDVTKKYKDLYSNLRN |
| | | IPRFFGESKKEQFNKFINKSLPTIDVGLKILEDIRNALETVSVRKPPSITE |
| | | EYVTKQLEKLSRKYKINAFNSNRFKQITEQVLRKYNNGELPKISEVFYR |
| | | YPRESHVAIRILPVKISNPRKDISYLLDKYQISPDWKNSNPGEVVDLIEI |
| | | YKLTLGWLLSCNKDFSMDFSSYDLKLFPEAASLIKNFGSCLSGYYLSK |
| | | MIFNCITSEIKGMITLYTRDKFVVRYVTQMIGSNQKFPLLCLVGEKQT |
| | | KNFSRNWGVLIEEKGDLGEEKNQEKCLIFKDKTDFAKAKEVEIFKNNI |
| | | WRIRTSKYQIQFLNRLFKKTKEWDLMNLVLSEPSLVLEEEWGVSWD |
| | | KDKLLPLLKKEKSCEERLYYSLPLNLVPATDYKEQSAEIEQRNTYLGLD |
| | | VGEFGVAYAVVRIVRDRIELLSWGFLKDPALRKIRERVQDMKKKQV |
| | | MAVFSSSSTAVARVREMAIHSLRNQIHSIALAYKAKIIYEISISNFETG |
| | | GNRMAKIYRSIKVSDVYRESGADTLVSEMIWGKKNKQMGNHISSY |
| | | ATSYTCCNCARTPFELVIDNDKEYEKGGDEFIFNVGDEKKVRGFLQK |
| | | SLLGKTIKGKEVLKSIKEYARPPIREVLLEGEDVEQLLKRRGNSYIYRCP |
| | | FCGYKTDADIQAALNIACRGYISDNAKDAVKEGERKLDYILEVRKLW |
| | | EKNGAVLRSAKFL |
| 133 | Cas12 | MSTQKNPFNQFTNLYELQKTLRFELRPVPETKKLLEKGEGKNLIQMD |
| | | LEIDRLYEKEMKPMFNILHEKFINESLGLVKLDCKKLKKLENLLAEADK |
| | | LRKQIKEGRKNKNNISEVEKRLKIIIGDNSQGKNKNGEIAVLQDELRV |
| | | LIVKAFNLTADKWKKELNNKETLLPEKKGKRKIKIKKSGPKILQEENVL |
| | | AILAYFNPDKADIIKKFAGFFTYFSGFNQNRANYYTVKALATGVANR |
| | | AINRNFLIFLANRKDFARFKERLPRLAEFDNYFELENYEKYLSQ.TGIEE |
| | | YNDQIGKIKQIVNLEHNQQQKDNKFQLKGLATLEKQIGCRTKKQRE |
| | | EGGDKSAPKFLEKVGLGFQVSQDDDGEYLIWECLNYINKELAGKLKS |
| | | IKDNYQKFFADWRTGAYDLEKIWFRKEALNTISGRWFGGNNWFIIG |
| | | KALALTGVGKFDKRENTYKIPEFVSLAEIKTAFEMLENGVNYDFKKSK |
| | | KKKEGDDTDVVKYSADNLFKEEYKKKGLIKNSLFETMLAVWQSEIKR |
| | | KFEQIFDGYKLEKDDVFGRKKGEWVEPFIENFQKVSQEKFDRGVKD |
| | | ENGRSIHTEVVKNLIEEGYLRLFQLTKYHNLDKKGERDPRPFDGNFY |
| | | ATLDEFWKDNIVVVYHKALQSTLTKKPYSEDKIKLNFENGSLLGGFS |
| | | DGQERSKAGVVLKNKNKFYLGILIDRGFFRTDKANPVYDNAQNNE |
| | | WERLILTNLKFQTLAGKGFLGKHGVSYGEMGKDNPMMAVEYLQKF |
| | | IKLKYLDKYPALNEVAHKKYTIKKEFDADVKNALKDCFTMNFKPVDF |
| | | GMIRQGLTESLFYLFEIVNKDISSQAKNGKNVHTLYWEALFGDQNLK |
| | | KPILALNGGAEIFYRESQREKLEKKLDKSGKEVLDHKRYGQDKYFLHA |
| | | SITINYGQPKNIKFKEVINEKISQNADRVNIIGIDRGEKHLLYYSVVSPE |
| | | GVLLEQGSFNQIETKNKVDIKAVKAEYGERGELKKVELVPTGKKVKY |
| | | VDYQILLDYYEKKRNLARRDWQTIGKIKDLKDGYLSQTVHRIYQLILK |
| | | YNAVVAMEDLNVEFKAKRAAKVEKSVYKNFEMALAKKLNHLILKDR |
| | | RADEIGGALRAYQLTPAIPANDVGKFDKAKQWGIMFYVRANYTSTT |
| | | DPLTGWRKHKYISNSEKIDNIQKFFSPGDGIQIDYDTEKQCFKFSYDH |
| | | ELEGGAKKHWELFACDGLERFYWDNRERQIKKYNLYEEFEKLLGGL |
| | | RKEENINIQIDGVSEFRWKDLVFFWNLLNQIRNTDRSAQGDENDFL |
| | | QSPVWSEKYNCFYDSRKAPNNMPNNGDANGAFNIARKGQLILERI |
| | | KKCSDIPKFGNDNNGKNPENNYFISDADWDKFAQK |
| 134 | Cas12 | MAQASSTPAVSPRPRPRYREERTLVRKLLPRPGQSKQEFRENVKKLR |
| | | KAFLQFNADVSGVCQWAIQFRPRYGKPAEPTETFWKFFLEPETSLP |
| | | PNDSRSPEFRRLQAFEAAAGINGAAALDDPAFTNELRDSILAVASRP |
| | | KTKEAQRLFSRLKDYQPAHRMILAKVAAEWIESRYRRAHQNWERN |
| | | YEEWKKEKQEWEQNHPELTPEIREAFNQIFQQLEVKEKRVRICPAA |
| | | RLLQNKDNCQYAGKNKHSVLCNQFNEFKKNHLQGKAIKFFYKDAEK |
| | | YLRCGLQSLKPNVQGPFREDWNKYLRYMNLKEETLRGKNGGRLPH |
| | | CKNLGQECEFNPHTALCKQYQQQLSSRPDLVQHDELYRKWRREYW |
| | | REPRKPVFRYPSVKRHSIAKIFGENYFQADFKNSVVGLRLDSMPAGQ |
| | | YLEFAFAPWPRNYRPQPGETEISSVHLHFVGTRPRIGFRFRVPHKRS |
| | | RFDCTQEELDELRSRTFPRKAQDQKFLEAARKRLLETFPGNAEQELR |
| | | LLAVDLGTDSARAAFFIGKTFQQAFPLKIVKIEKLYEQWPNQKQAGD |
| | | RRDASSKQPRPGLSRDHVGRHLQKMRAQASEIAQKRQELTGTPAP |
| | | ElIIDQAAKKATLQPFDLRGLTVHTARMIRDWARLNARQIIQLAEE |
| | | NQVDLIVLESLRGFRPPGYENLDQEKKRRVAFFAHGRIRRKVTEKAV |
| | | ERGMRVVTVPYLASSKVCAECRKKQKDNKQWEKNKKRGLFKCEGC |
| | | GSQAQVDENAARVLGRVFWGEIELPTAIP |
| 135 | Cas12 | MAVRSVKLKLLVPRDGSAESVRKRKALWATHQFVNDAAAAYAELLL |
| | | EMRQEDVCRGTDDHGKDVIEPAAHWQAKLRARLAAKQLPPVAVA |
| | | EALPLLKAFYGSRLIKSFVANDKGVAGTGNATDLNTWLSGLVDPASV |
| | | AGEKTELRKQLLAELPLCEAADADFEGAARKMLAKSDAREALLEGP |
| | | GTGVGWPAAYNANPTDSVWLDMLHKAAAKARLELADTTVSELKK |
| | | LGVFPLLQAASSNRVFGSGVLNPFERMAAAQAAAALLPWETKRHE |
| | | MRKRRDKFADQLNQWDTEFGASHATALAAIRAFEAEESERARRESL |
| | | GNEGTGYRIGGRELRDAWTLLRDWLKGHSTATAAAREDKVRELQA |
| | | KQGRSFGSHRLLSWLAKPAQQWLADHSAGDVVTRIAVRNARQRK |
| | | LDTARTLPIWTGADAVKHPRFANFDPPNNTNQPGFDLRAGTOKGR |
| | | LTLRLSLLTERADGLLLAQDHDFQLVPSRQMAEIVLHKDGKERALSW |
| | | QSQDGIGRQVGDVGGSALLFSRDHAECLLERKQITRLERGAWPAAL |
| | | PVWFKLSLDIGAEHKALLKQRFKWGVWLNSALVTRNAKDAKGVPP |
| | | PVGTRVLAVDLGLRSAATVSVWQVVDAATPVVAGKWRVPLSDTLS |
| | | AVHERSAMLALPGEHVDAGVLAARRAANEKLAGLLAATSHLSTVFK |
| | | LGRAEQGDRRRELLERLGEGDDRRARAAVATTAAERDGLRAVLGA |
| | | TQDAWAGAVAAVWRRLETDLAGAIAAYRKQQREDVQLRREARHG |
| | | PGASQLPKQAAAERLLGGKSAWQIEYKERVRKLLTRWIMRQRPGD |
| | | TAVRRLARKDLGKYCGGLLDHLTALKEDRAKTTADLIVQAARGRVR |
| | | AHKDAHGRQQDRELWLAKYAPCDLIVMEDLGRYRFATDRPPSENR |
| | | QLMQWTHREVFRLVQMQAEVEGIQVLETGAEFSSKFDARTWAPG |
| | | VRCEPITKLWVERYRNGEMPWLADKADEWRREGIELAQLVPGQLL |
| | | PTGSGEQFVAVSATGGLRVRHADLNAAQCIALRALTGHGTAFRLTA |
| | | RRLGDVFVSAKGLGKRPQGALWREFGSALPPAVVVLRPAGEVRYAL |
| | | RPFASARDAAAALGLQLGALRNVDATDAESDAEDGDLAELLAGAD |
| | | PDRATFFRDPSGDVHGGAWVQAKVFWAEVRRHVRLGLQAQGLLP |
| | | AAARSSEPRQMQLPLAGALPGDDIPL |
| 136 | Cas12 | MNRIYQGRVSKIEIKDSEGNFRNVPVGSPDTCPLWRHHRIFQDAVN |
| | | YYLVALGALAGTGSENAFVGLGSKDRVIHDLYSRLFDSWERFPRDM |
| | | HGASSLRDSLRRTLPGLSERASLQDAFDAILSGNEANARERVLSLLSLI |
| | | QDLGGDIQKGSKRYFPFFCEPATKATFPRARVGLLKVEGKDFVPRLL |
| | | WSSDLEIAPDQVVEQLKFEYFANPNESVQPIEGNEARVRLIEALDNP |
| | | QLGIELPIEILSDLRKRVHLIETDIRIPRYFFGGAGAELRKFRLDLFLIAA |
| | | YVTPDPSILRALRNSFKEPSASKSSKKKDETEEVENLLRSLGDDPLILA |
| | | RGERGFVFPSFTSLPTWVGANAQKPIWRDFDIAAFAEALKSLNQFT |
| | | AKTEEREEKLKKAEETLHYMLGISDAIPRSSDSETEEQAPSRPGKDPR |
| | | WPLVAQLEKELGENLSEGTWQLSRSAMRGLRDIIGLWRKHPGASV |
| | | VTLQKDVKTYQADEKHKREIGSVQLFLLLCEERYHALWQTETDDER |
| | | GDESEENDDPARILSDAIEVHQIRREVERFREPIRLTPAEPVFSRRLF |
| | | MFSDLTDKLAKVKFGETTEENSEVKSQFVEAAIALKEGENLKEARVRI |
| | | TFSAPRLHRDELLGGAESRWLQPITAALGFSNPAPSVKFDSAVALM |
| | | PDHMDDGRIRHLLNFPVNFDSAWLHQSIGKADLWKSQFNGTKDK |
| | | NLHLHWAGTARDTTRKNTWWENRTIIENGFTVLSNDLGQRSAGA |
| | | WALLKVTCSRPDTKHPVRSIGHDGTREWFATVLATGIHRLPGEDQR |
| | | ILKNGKWATEQSGKKGRNATFSEYEAACVLAKNLGCESVENWLGM |
| | | SGEKSYPALNDQLVKIANRRITRLGTYHRWSCFSPEKFEDPARRANV |
| | | IGGQLAELSAYQDENVTVSADILKSGDFEGFRHRAGAAFEALRTELE |
| | | VHLVNLANLTAPLRQKVWSWQKRPDSSGYGDLLMVDLDDCHPKIR |
| | | GQRGLSMARLEQLEGLRRLFLRYNRSLDRSPGIPAKFGREDVGRTSG |
| | | EPCQALLVKIDRMKEQRVNQTAHLILAQALGVRLCPHRIEENERKSR |
| | | DLHGEYEKIPGREPVDFIVIEDLSRYLSSQGRAPSENSRLMKWAHRA |
| | | VRDKLKMLAEEPFGIPVVETVPAYSSRFHALNGQAGSRLHELHELEA |
| | | YQQQSLINLAAKTDFQNRDRSKAAGELFEQFQALAKLNERRRAEGK |
| | | KVPRTLYYPKSGGPLFLASRDGDTIHADVNAAINLGLRAIAAPACIDI |
| | | HRRLRATKEKEVYRPRVGNAREKSAFSKDDIIQPSGAPSKKFASSSSP |
| | | NFFYEPEDLKQANGEPLFDRAMFGEYSLVSGVSLWSMVNNAIYIRC |
| | | VELNRTRLHGKDPDDQIPM |
| 137 | Cas12 | MADDLSTQRAYTLRLQGTDPEDQSWRDALWMTHEAVNAGGRAF |
| | | GDWLLTLRGGIAHELADTPVKGKKDITDELRKKRRILLALSWLSVESR |
| | | RGAPDKFIVAGGEEPAGSRNEKVLQALKEILKRRGLSAEESESWMS |
| | | DCRASLSAAIRDDAVWVNRSAAFDDAQVRIGASLTREDIWDMLDP |
| | | FFGSREAYLTPAKKKKEDEDSSEGTGEEKAKDLVQKAGQWLSSRFG |
| | | TGKGANFDAMAEVYSKISEWAGTAQEGVSGKEGIKNLADALAAFS |
| | | PVSQNLEGVLKLISGPGYKSATRNLLGELDSLPVVSRDHLSALHEKAA |
| | | EDTVKCKESTGTKGRRPYADAILNDVEKRCGFTYLTDSDNRSVSILDT |
| | | SEFPSDYKWGTARHSEFAVILDHAARRISVAHSWIKLAEAERDRCEE |
| | | DAAKVYDLPDKVKEWLDTFCSNRSDISGAQGEGYRIRRKAIEGWKE |
| | | WASWGRSSCITAEDRVAAARALQDDPEIDKFGDIQLFEILAQDEAL |
| | | CVWHKDGDVAKSPDAQMLIDYVLASDAESKKRRFKVPAYRHPDAL |
| | | LHPIFCDFGNSRWDITYDIHGARGKKKAKRGSKKEEAMPRGVAMK |
| | | LWTGSDVLSVSLRWQSKKLAADLALDQEAEEVTDTAAVSRADRLG |
| | | RAAAGIDRGAGVTIAGLFEEAHWNGRLQAPRQQLEAIAAVRDNQK |
| | | LSSEERERRIAFMKDRIRWLVTFSAKLRPQGPWHSYAPTQGLQSDP |
| | | KYWPHSEINKKRKGQAKLILSRLPGLRILSVDLGHRFAAACAVWET |
| | | MSSEAIQEACRLANHQLPAPADLYLHLKRTVQKNLIDGEKTVEESTV |
| | | YRRIGADRLPDGTAHPAPWARLDRQFLIKLQGEEKVREASNEEVW |
| | | QVHLMESALGLSFPLIDRLVYAGWGGTEKQAARLEALREKGWKPT |
| | | GTPADQDEEGGGYKPSLAVDELMFSAVRTLRLALKYHGDRARIAFA |
| | | LTADYKPMPGDTRYYFSEAKDRSSGADAAEREAKHKDYLLDMLLL |
| | | WHDLAFSRKWRDEEAKELWNLHIAALPGYQAPAAPIQEEAGQGRK |
| | | KAREEARAKMTPAAEALLADGTLREKLHGLWKERWEKDDAQWKK |
| | | HLRWMKDGILPRGGRAATPSIRYVGGLSLTRLATLTEFRRKVQVGFY |
| | | TRLFPSGEKREIKEAFGQTALDALERLREQRVKQLASRIAEAALGAGR |
| | | VSRTALKQDPKRPEARVDAACHAVIIENLEHYRPEETRTRRENRGLM |
| | | NWASSKVKKYLSEACQLHGLFLREVPAGYTSRQDSRTGAPGMRCQ |
| | | DVTVKTFLNSPFWQKQCVQAQKNKSTARDRFLCALKEAVAQGGM |
| | | EEEKKMGPIRVPVPGGEVFVSADAASPAAKGLQADLNAAANIGLRA |
| | | LLDPDWPGKWWYVPCDRKTAYPAKEKVEGSAAVDVKQALPFVLPE |
| | | EKENKGKTKGGKKGKGEVMNLWRDVSAEPLMTGQWLDYTAYRK |
| | | EVENRVIQVLTAQLKARNPLRFGNLGDEEEIPY |
| 138 | Cas12 | MAIRSIKLKLKTHTGPEAQNLRKGIWRTHRLLNEGVAYYMKMLLLF |
| | | RQESTGERPKEELQEELICHIREQQQRNQADKNTQALPLDKALEALR |
| | | QLYELLVPSSVGQSGDAQIISRKFLSPLVDPNSEGGKGTSKAGAKPT |
| | | WQKKKEANDPTWEQDYEKWKKRREEDPTASVITTLEEYGIRPIFPLY |
| | | TNTVTDIAWLPLQSNQFVRTWDRDMLQQAIERLLSWESWNKRVQ |
| | | EEYAKLKEKMAQLNEQLEGGQEWISLLEQYEENRERELRENMTAA |
| | | NDKYRITKRQMKGWNELYELWSTFPASASHEQYKEALKRVQQRLR |
| | | GRFGDAHFFQYLMEEKNRLIWKGNPQRIHYFVARNELTKRLEEAKQ |
| | | SATMTLPNARKHPLWVRFDARGGNLQDYYLTAEADKPRSRRFVTF |
| | | SQLIWPSESGWMEKKDVEVELALSRQFYQQVKLLKNDKGKQKIEFK |
| | | DKGSGSTFNGHLGGAKLQLERGDLEKEEKNFEDGEIGSVYLNVVIDF |
| | | EPLQEVKNGRVQAPYGQVLQLIRRPNEFPKVTTYKSEQLVEWIKASP |
| | | QHSAGVESLASGFRVMSIDLGLRAAAATSIFSVEESSDKNAADFSYW |
| | | lEGTPLVAVHQRSYMLRLPGEQVEKQVMEKRDERFQLHQRVKFQI |
| | | RVLAQIMRMANKQYGDRWDELDSLKQAVEQKKSPLDQTDRTFWE |
| | | GIVCDLTKVLPRNEADWEQAVVQIHRKAEEYVGKAVQAWRKRFAA |
| | | DERKGIAGLSMWNIEELEGLRKLLISWSRRTRNPQEVNRFERGHTS |
| | | HQRLLTHIQNVKEDRLKQLSHAIVMTALGYVYDERKQEWCAEYPAC |
| | | QVILFENLSQYRSNLDRSTKENSTLMKWAHRSIPKYVHMQAEPYGI |
| | | QIGDVRAEYSSRFYAKTGTPGIRCKKVRGQDLQGRRFENLQKRLVN |
| | | EQFLTEEQVKQLRPGDIVPDDSGELFMTLTDGSGSKEVVFLQADINA |
| | | AHNLQKRFWQRYNELFKVSCRVIVRDEEEYLVPKTKSVQAKLGKGLF |
| | | VKKSDTAWKDVYVWDSQAKLKGKTTFTEESESPEQLEDFQEIIEEAE |
| | | EAKGTYRTLFRDPSGVFFPESVWYPQKDFWGEVKRKLYGKLRERFL |
| | | TKAR |
| 139 | Cas12 | MPVRSINLKIVISRNTQGEKSRQSIWTTHAAVNDAVRYYEEQLLIMR |
| | | GLGYHISDKDVVSKESIQQERLSRIRRAQLENGLPEPLGTDAELNSLV |
| | | RKFYEFIVPSSVKEDGNAQQANGFLSPLTDPISIGYLSIFEKLGTIPDW |
| | | VGQLKAGDPQAVENAKKWSATSAGIKRLSETGAPPKWKKLFLTGD |
| | | PSWPQSFSEDIDKKIKEIEGAPKVICQLMEMGVLPLFPAYFADKLEGS |
| | | DGSLSRWDRLAFRLAVGHMLSWESWCIKSAEDHFERKRRVESFSEK |
| | | HTTPSLIICFETLEKYQKERQEKELGQNRSLPMQRPFRITRRQIRGWE |
| | | DLRDKWLKNTTRTYDSLKSIASKEQTKKGGRFGDPHLFLWLAKPEN |
| | | HAVWDADEDALSIFAKMNAMRGLLERSRETAYMTLPDPIEHPRSIQ |
| | | WEAEGGSNFKNYVITHSPVEGLHVQLPLLCKSESGKLIDQTFEFPLAP |
| | | SDQFKVAQISKTKSEVTITHQSVLDEEYRSKVGAADLLMDWPYLKN |
| | | RRFESVEHGDIGPVFLKLSLDIERILPDGWTPKRPQAISHFSSASGNS |
| | | KHKLSVVSGLRVLSVDLGIRSFGACSVFELSEHKPTSGMSFEIEGLNL |
| | | WANHERSFMLNLPDEDVGNKGRQLQKTKDAELRAMRRVLGRYRK |
| | | IYALAGIDPEDRKDILELLCQDQDIFEFERTIYKGLVTSTSVSQPLWEG |
| | | KIKESLKALRNAFGRKVREWRRANRLNSNLKYAGKTMWAIQHLED |
| | | TRRFLHSWSHLGRFSGEIRRADRVKRGVFATRLLQHLDSVKRDRLKT |
| | | GADLLVQSARGFLRDNQGNWKKSYAPCQVILFEDLSRYLMQTDRP |
| | | RRENSQLMKWSHRSIPLEVAMQGELYGIHVCDTSAAFSSRYHARLA |
| | | TPGIRCHALRKEDLSNQFLIESLQKENPDIDFGICKAGDLIPRGGGEIF |
| | | VSCDGNGGISRIHADINAAQNLQRRFWLRHGEAIRIPARKITLKGDEI |
| | | WVPRSIGKRLQGAMSGCGYLIPTGHESGSCRWERITASKWESISRSS |
| | | VAQKEEVNEDLLDIALLEEEALELSNEYTTFFRDPSGITLPSDLWFPM |
| | | KTFWGMTRAKIKSAIKQ |
| 140 | Cas12 | MTVKSIKVKLRLDNMPEIRAGLWKLHTEVNAGVRYYTEWLSLLRQE |
| | | NLYRRSPNGDGEQECYKTAEECKVELLERLRARQVENGHRDPAGSD |
| | | DELLQLARQLYELLVPQAIGAKGDAQQIARKFLSPLADKDAVGGLGI |
| | | AKAGNKPRWVRMRDAGEPGWEEEKAKAEARKSTDRTADVLRALA |
| | | DFGLKPLMRVYTDSDMSSVQWKPLRKGQAVRTWDRDMFQQAIE |
| | | RMMSWESWNQRVGEAYAKLVEQKSRFEQKNFVGQEHLVQLVNQ |
| | | LQQDMKEASHGLESKEQTAHYLTGRALRGSDKVFEKWEKLDPDAP |
| | | FDLYDTEIKNVQRRNTRRFGSHDLFAKLAEPKYQALWREDASFLTRY |
| | | AAYNSILRKLNHAKMFATFTLPDATAHPIWTRFDKLGGNLHQYTFLF |
| | | NEFGEGRHAIRFQKLLTIEHGVAKEVDDVTVPISMSAQLDDLLPGES |
| | | NEPTELSFRDHGTDQHFTGEFGGAKIQYRRDQLDHVHRRRGARDV |
| | | YLNLSVRVQSQSEARGERRPPYAAVFRLVGDTHRAFAHFDKLSNYL |
| | | AEHPDDGKLGSEGLLSGLRVMSVDLGLRTSASISIFRVARKDELKPNS |
| | | EGRVPFFFPIKGNDNLVAVHERSQLLKLPGETESKDLRAIREERQRIL |
| | | RQLRTQLAYLRLLVRCGSEDVGRRERSWAKLIEQSVDAANHMTPD |
| | | WREAFEGELQKLKSLYGICGDREWTEAVYESVRRVWRHMGKQVR |
| | | DWRKDVRSGERPKIRGYQKDVVGGNSIEQIEYLERQYKFLKSWSFF |
| | | GKVSGQVIRAEKGSRFATTLREHIDHAKEDRLKKLADRIIMEALGYVY |
| | | ALDAERGKGTWVAKYPPCQLILLEELSEYRFNNDRPPSENNQLMQ |
| | | WSHRGVFQELLNQAQVHDLLVGTMYAAFSSRFDARTGAPGIRCRR |
| | | VPARCAREQNPEPFPWWLNKFVAEHKLDGCPLRADDLIPTGEGEFF |
| | | VSPFSAEEGDFHQIHADLNAAQNLQRRLWSDFDISQIRLRCDWGE |
| | | VDGEPVLIPRLTGKRTADSYGNKVFYTNTGVTYYERERGKKRRKAFA |
| | | QEELSEEEAELLVEADEAREKSVVLMRDPSGIINRGDWTRQKEFWS |
| | | MVNQRIEGYLVKQIRSRVCLPESACENTGDI |
| 141 | Cas12 | MKNFQDFTNLYELSKTLRFELKPIGGTKKLIEEKNILKLDKKKRENYEK |
| | | VKPYFNKIHQEFINFALRNPNFDFSQFEEKYLNWLKDKKNKDLLKEK |
| | | ESIDKIFLEKIGKLFENSVKDFLKENGFESIVKEEDQNLKFFRRKEIFEVL |
| | | QEKYGSELETQMVNKDGEIKSIFNGWEKWLGYFDKFFNTRDNFYKT |
| | | DGTSTAIATRIIKDNLKIFLENIVAFGKIKNKKIDFSEVEKNFSVSIDTFF |
| | | EINNFNNCFLQDGIDFYNKVIGGETLENGEKLKGLNEIINKYRQDTGE |
| | | KIPYFKKLQKQILSEKDGVFIDKIEDDGGFYEVLKNFYKNAAEKEGFLK |
| | | NIFENFYTISDKNLEKIYFNKIAFNTISHKFGSALEFERILYEEMKKEKA |
| | | DGIKFEKKENKYKFPDFIQIIFIKRSLENYDSENLFWKERYYKSEENVD |
| | | GFLEKNNNNLWGQFCKILNFEFLNILKRRIIDEAGEEYEVGFEISKNIL |
| | | GEKLENFELNQENKGIIKDFADYSLALYSFGKYFAVEKGRNWDLNIDI |
| | | SDDFYGGEDGYIEKFYNTGYDEIVKPYNLMRNYISKKPWEDNKKWK |
| | | INFETSSLLSGWDKNLESNGSYIFQKGNKYYLGIINGSKPAKEILEKLYS |
| | | GDGEKIKRFIYDFQKPDNKNTPRMFIRSKKDSFSPAVEKYNLPINDIL |
| | | EIYDNGLFKTENKGNPNYKESLRKLIDYFKLGFSRHESFKHFNFVWK |
| | | DSKSYENIADFYRDVEKSCYKIDFEFLNFEELKKLTFEKHLYLFQIYNKD |
| | | FELDESLQEKGYNFKGEGQKNIHTKYFEALFLEENISRKSGAVFKLSG |
| | | GGEVFFRKKSIKAKKEKRNSVEVIKNKRYTECKYFLHFPIQVNFKEEIS |
| | | GNFNQEINKFLANNPDINVIGIDRGEKHLAYFSVINQKGEILESGSFN |
| | | KIENYNKNGEKLLFPEREIKEIHKDGSLIDLELVETGRKVDYVDYKLLLE |
| | | YKERKRLLQRQSWKEVEQIKDLKKGYISALVRKIADLIIKHNAIVIFEDL |
| | | NFRFKQIRGGIEKSIYQQLEKALIDKLNFLVNKNEINLEKAGSILKAYQ |
| | | LTVPVDSLKEIGKQTGVIFYTEAAYTSKIDPITGWRPNLYLKKNNSKIN |
| | | KENILKFDNIVFNSKENRFEFTYDLKKFFGKDSKFPAKTVNTVCSCVE |
| | | RFKWNRNLNNNKGGYIHYENLTDGKLANKEQKEDEFSNFKELFEKY |
| | | FIDINGNILEQIKNLDTKNNEKFFSSFIDLFTLVCQIRNTNQNAKGDE |
| | | NDFILSPVEPFFDSRKSQNFGKSLPKNGDENGAFNIARKGLIILNRISE |
| | | NPEKPDLLIFNADWDNFARNI |
| 142 | Cas12 | MAQAEAPRRLRAYKFALDPTEAQLREFEQHAGSARWAYNHANAIL |
| | | SRYSDTLRNRWNAWIAQHHGLSREQLYALPDRERTAIQAAARAAV |
| | | KAENAQLAAELRIIDDHRKRVTHKGKPSVEPGEQPAEDAPERAYQL |
| | | WRERVELARLHAEDPQAYRAERKRILDEIRPLVNATKRKLIEQGAYR |
| | | PTAMDISTLWREIRDLPPDEGGSPWWPEVSIYAFTSGFAHAETAW |
| | | KNYLESLAGRRAGRPVGKPRFKKKRRSRRSFTLYGSVKLVTYRRIQVP |
| | | SIGSVRLHGSAKRLHRALERRGGIIKSITISQGGHRWYASVLVDELDIT |
| | | PGRETQRGPSRRQRDRGAVGVDLGVHHLVALSDPNEKTLDNPRHL |
| | | RKARKRLLKAQRAMSRRRGPDKRTGQEPSRRWVKARNRVARLHH |
| | | ELAVRRAGHLHEITKRLATSYELVAIEDLNVAGMTRSARGTIDQPGR |
| | | GVRAKAGLNRSILDTSPAEFRROLOYKASWYGATVAVIDRWAPTSR |
| | | TCSSCGAVKAKLSLAERTFFCEHCGMELDRDINAARNILAFAQSAYP |
| | | GEGKALNACGGSVSPGSQSVVQAGADEAGRPARKPRRSSRGSDPP |
| | | ATPTTRA |
| 143 | Cas12 | MKRIAKFRHDKPVKREAWSKGYRVHKNRIINKVTRSIKYPLVVKDE |
| | | WKKRLIDDAAHDYRWLVGPINYSDWCRDPNQYSILEFWIDFLCVG |
| | | GVFQSSHSNICRLAIQLSGGSVFEQEWKDLSPFVRANLIQGIKPAEFI |
| | | GFLTAEFRSSSNPKNFISKFFEGSNEDLESLTNEFASIVDFIKAKDISLLR |
| | | KSLPSCKKIAPNLWEKAVGSHSTNELLKLLTKYTRVMLVAEPSHSDR |
| | | VFSQTVLQSNDQDDPELTGPLPSHKVGKASYLFIPEFIREVNLDKISKL |
| | | DLSAKSKLAVEQVKKLSELTSDFKQIENQSEAYFGLSTSFNELSNFLGI |
| | | LIRTLRNAPEAILKDQIALCAPLDKDILKITLDWLCDRAQALPENPRFE |
| | | TNWAEYRSYLGGKIKSWFSNYENFFEIPQAASSQQNNNREKKLGNR |
| | | SAIRALNLKKEAFEKARETFKGDKGTLEKIDLAYRLLGSISPEVLQCDE |
| | | GLKLYQQFNDELLVLNETINQKFQDAKRDIKAKKEKESFEKLQRNLSS |
| | | PLPRIPEFFGERAKKGYQKARVSPKLARHLLECLNDWLARFAKVEES |
| | | AFSEKEFQRILDWLRTSDFLPVFIRKSKDPPSWLRYIARVATGKYYFW |
| | | VSEYSRKRVQIIDKPIAQNPLKELISWFLLNKDAFSRDNELFKGLSSK |
| | | MVTLARIMAGILRDRGEGLKELQAMTSKLDNIGLLHPSFSVPVTDSL |
| | | KDAAFYRAFFSELEGLLNIGRSRLIIERITLQSQQSKNKKTRRPLMPEP |
| | | FINEDKEVFLAFPKFETKNKVKGTRVVYNSPDEVNWLLSPIRSSKGQL |
| | | SFMFRCLSEDAKIMTTSGGCSYIVEFKKLLEAQEEVLSIHDCDIIPRAF |
| | | VSIPFTLERESEETKPDWKPNRFMGVDIGEYAVAYCVIEKGTDSIEIL |
| | | DCGIVRNGAHRVLKEKVDRLKRRQRSMTFGAMDTSIAAARESLVG |
| | | NYRNRLHAIALKHGAKLVYEYEVSAFESGGNRIKKVYETLKKSDCTGE |
| | | TEADKNARKHIWGETNAVGDQIGAGWTSQTCAKCGRSFGADLKA |
| | | GNFGVAVPVPEKVEDSKGHYAYHEFPFEDGLKVRGFLKPNKIISDQK |
| | | ELAKAVHAYMRPPLVALGKRKLPKNARYRRGNSSLFRCPFSDCGFT |
| | | ADADIQAAYNIAVKQLYKPKKGYPKERKWQDFVILKPKEPSKLFDKQ |
| | | FYRPN |
| 144 | Cas12 | MAQAEAPRRLRAYKFALDPTEAQLREFEQHAGSARWAYNHANAIL |
| | | SRYSDTLRNRWNAWIAQHHGLSREQLYALPDRERTAIQAAARAAV |
| | | KAENAQLAAELRIIDDHRKRVTHKGKPSVEPGEQPAEDAPERAYQL |
| | | WRERVELARLHAEDPQAYRAERKRILDEIRPLVNATKRKLIEQGAYR |
| | | PTAMDISTLWREIRDLPPDEGGSPWWPEVSIYAFTSGFAHAETAW |
| | | KNYLESLAGRRAGRPVGKPRFKKKRRSRRSFTLYGSVKLVTYRRIQVP |
| | | SIGSVRLHGSAKRLHRALERRGGIIKSITISQGGHRWYASVLVDELDIT |
| | | PGRETQRGPSRRQRDRGAVGVDLGVHHLVALSDPNEKTLDNPRHL |
| | | RKARKRLLKAQRAMSRRRGPDKRTGQEPSRRWVKARNRVARLHH |
| | | ELAVRRAGHLHEITKRLATSYELVAIEDLNVAGMTRSARGTIDQPGR |
| | | GVRAKAGLNRSILDTSPAEFRROLOYKASWYGATVAVIDRWAPTSR |
| | | TCSSCGAVKAKLSLAERTFFCEHCGMELDRDINAARNILAFAQSAYP |
| | | GEGKALNACGGSVSPGSQSVVQAGADEAGRPARKPRRSSRGSDPP |
| | | ATPTTRA |
| 145 | Cas12 | MAIRSIKLKLKTHTGPEAQNLRKGIWRTHRLLNEGVAYYMKMLLLF |
| | | RQESTGERPKEELQEELICHIREQQQRNQADKNTQALPLDKALEALR |
| | | QLYELLVPSSVGQSGDAQIISRKFLSPLVDPNSEGGKGTSKAGAKPT |
| | | WQKKKEANDPTWEQDYEKWKKRREEDPTASVITTLEEYGIRPIFPLY |
| | | TNTVTDIAWLPLQSNQFVRTWDRDMLQQAIERLLSWESWNKRVO |
| | | EEYAKLKEKMAQLNEQLEGGQEWISLLEQYEENRERELRENMTAA |
| | | NDKYRITKRQMKGWNELYELWSTFPASASHEQYKEALKRVQQRLR |
| | | GRFGDAHFFQYLMEEKNRLIWKGNPQRIHYFVARNELTKRLEEAKQ |
| | | SATMTLPNARKHPLWVRFDARGGNLQDYYLTAEADKPRSRRFVTF |
| | | SQLIWPSESGWMEKKDVEVELALSRQFYQQVKLLKNDKGKQKIEFK |
| | | DKGSGSTFNGHLGGAKLQLERGDLEKEEKNFEDGEIGSVYLNVVIDF |
| | | EPLQEVKNGRVQAPYGQVLQLIRRPNEFPKVTTYKSEQLVEWIKASP |
| | | QHSAGVESLASGFRVMSIDLGLRAAAATSIFSVEESSDKNAADFSYW |
| | | IEGTPLVAVHQRSYMLRLPGEQVEKQVMEKRDERFQLHQRVKFQI |
| | | RVLAQIMRMANKQYGDRWDELDSLKQAVEQKKSPLDQTDRTFWE |
| | | GIVCDLTKVLPRNEADWEQAVVQIHRKAEEYVGKAVQAWRKRFAA |
| | | DERKGIAGLSMWNIEELEGLRKLLISWSRRTRNPQEVNRFERGHTS |
| | | HQRLLTHIQNVKEDRLKQLSHAIVMTALGYVYDERKQEWCAEYPAC |
| | | QVILFENLSQYRSNLDRSTKENSTLMKWAHRSIPKYVHMQAEPYGI |
| | | QIGDVRAEYSSRFYAKTGTPGIRCKKVRGQDLQGRRFENLOKRLVN |
| | | EQFLTEEQVKQLRPGDIVPDDSGELFMTLTDGSGSKEVVFLQADINA |
| | | AHNLQKRFWQRYNELFKVSCRVIVRDEEEYLVPKTKSVQAKLGKGLF |
| | | VKKSDTAWKDVYVWDSQAKLKGKTTFTEESESPEQLEDFQEIIEEAE |
| | | EAKGTYRTLFRDPSGVFFPESVWYPQKDFWGEVKRKLYGKLRERFL |
| | | TKAR |
| 146 | Cas12 | MVVRSIKLKMKTNSGTDSIYLRKALWRTHRLINEGIVYYMSLLTLYR |
| | | QDTLGDRTKEEIQSELIKKIREQQRNNGLSEELGSDQEILSLLRHLYELI |
| | | IPSINGESGDANQLGNKFLYPLVDPNSQSGKGTSNAGRKSKWKRM |
| | | KEEGNPDWEVEFKKDEERKANDPTIKVFDHLKKYSLLPLFPLFTNNQ |
| | | KDIEWLPMGKRQSVRKWDKDMFIQAIERLLSWESWNRRLGAERE |
| | | KLEEKIENFYKEHLSGGQIWIEKIREFERVRDRELGETSFSSNDGYLITS |
| | | RQIRGWDRVYEKWSKISESASKEELWRVVAEQQSKMREGFGDPKV |
| | | FSFLAELENMDIWRKHPERIYHIATYNGLLKKLSHTKAQATFTLPDAV |
| | | KHPLWIRYEAQGGTNLNLFKLEETTKKNCKVILSKIIWPTEDGWFEK |
| | | ENVEVDLAPSKQFYRQIKLQDHIKGKQEISFSDYSSGISLKGVLGGSRI |
| | | QFDRKYIENHQELLPSGDIGPVFFNLVIDLLPIQETRNGRLKSPIGKTL |
| | | KVVSSEFPKVIDYKPKELTEWINVSSVTGKVGVESITEGMRVMSIDL |
| | | GQRTSASVSIFEVVKELPKDKEKMLYYNIKDTELFALHKRSFLLNLPGE |
| | | EVTKRNRQKRKDRRKKLLFIRSQIRMLASVLKLETKNTPDERKKAINK |
| | | LVEIVDSYEWTESEKEIWNSEFEYLTNKAVFKQEIWRESLIKSHHRM |
| | | EPHVGQLVSEWRKSLNEGRRNLAGITMWNIEELEDTRRLLISWSKR |
| | | SRTPGEANRINNDEPFGAKLLEHIQNVKDDRLKQLANLIVMTALGYK |
| | | YDKEEKSRDKRWKEKYPACQVILFENLNRYLFSLDRSKRENSKLMK |
| | | WAHRSIPRTVWMQGEMFGLQVGDVRSEYSSRFHAKSGAPGIRCH |
| | | SLNDEDLKEESFKLKHLIETGFISEEEISSLKKGDIVPWPGGELFVTLSK |
| | | PYKKGKDIELTVIHADINAAQNLQKRFWQQNSEVYRIPCQLEKAGD |
| | | DEFFIPKSQTEIVKKYFGKGRFVKINDKKEVYNWEESEKMKIKTESTIT |
| | | LQDLEGFEDIFQTLELAQEQQKKYSTLFRDPSGYFFNEKNWRPQKEF |
| | | WSIVNNIIRSSLKKKILKNKVEV |
| 147 | Cas12 | MSNPNIPNISPNITLTRDDVVNLLMSSIAMEELGLAHIINAEGEKIQF |
| | | ALGTLQGASGPPATLQQVLEVNQSTQAMLDTIFRQEMMLDSKLKT |
| | | ATNIPTLRGPTGPVGPTGAPGGVISINGQTGVVTLDASNGVMPFM |
| | | REQSTSSLDDYKDPGIYXXXXXXXXXXXXXXXXXXXXXXXXXXXXXXX |
| | | XXXXXXXXXXXXXXXXXXXXXXXXXXXXXXXXXXXXXXXXXXXXXXXX |
| | | XXXXXXXXXXXXXXXXXXXXXXXXXXXXXXXXXXXXXXXXXXXXXXXX |
| | | XXXXXXXXXXXXXXXXXXXXXXXXXXXXXXXXXXXXXXXXXXXXXXXX |
| | | XXXXXXXXXXXXXXXXXXXXXXXXXXXXXXXXXXXXXXXXXXXXXXXX |
| | | XXXXXXXXXXXXXXXXXXXXXXXXXXXXXXXXXXXXXXXXXXXXXXXX |
| | | XXXXXXXXXXXXXXXXXXXXXXXXXXXXXXXXXXXXXXXXXXXXXXXX |
| | | XXXXXXXXXXXXXXXXXXXXXXXXXXXXXXXXXXXXXXXXXXXXXXXX |
| | | XXXXXGATGATGATGATGPQEPRALREPRAPQARREPRGLLEPQVL |
| | | RGPQEPRALREPRAPRALREPRALRALRALQELRAPRALRGLQEPRV |
| | | LQGPRERQVRPEPRVLQGPRERQVRQGLQGLLEPRAKRERQVRPE |
| | | PREPQERQAPLVQQALLEPQALLGQAL |
| 148 | Cas12 | MNRIYQGRVSKVEIPNPGDKGKPWQPLPNWQDILWQHHELFQD |
| | | AVNYYLLALLSLARDSANPATPIRKRMDDPASEHQIWTSFRRRGQM |
| | | RSGMRDSVAKYLCPVKTEPTLDECFAAVLEGNKENPDVLDLALQELL |
| | | DECDGDGAIQQEGRSMLPRFCSPSYKGDFPQSAAAKDKKSAKEWL |
| | | PTFLHSAENASNLKLVRQRLKFELFANRDLTGRILDAVESRKRLTEML |
| | | GWLTERNPSLAAERERLQKIIAALPDTFNLPAWRGGSVNKEALKQR |
| | | FYAWLIFEHVESSRITFDILRDSFPTPKEKRKSVSETIQSEKPSLELSDD |
| | | PIKLARGTRGYVFRAFTSLPCWGADNANLLAWKEFDVAAFKEALKA |
| | | LHQVESKSEERNKERERLLQRHSVMRGSIKWKPSPESEEKEPDVLAG |
| | | DPRIERLEKLLKTELASEYEMSEGQTVEYGLQPRTIRGFRDLRKEWN |
| | | KIVKPGEPFTEQKKGNLVTALRSYQIENPNVIGSVRLYEALLEKGNWL |
| | | VWQEADSATVEKWAKQKFASDPLEALTEERQLLRDIERLKQPIRFTP |
| | | ADAVHSRRQFYLAEKGDLSVKNRFDPQNQ.TLQVPIAIKNDDHWKQ |
| | | QFVKIHFSAPRAVRDQLIDETMEESKEARWQQPMMEALGLSLKLT |
| | | KNNAEVSLSECTAVSLMPEELASGDRRILLNFPITLETAPMVKALGKA |
| | | SLWDGQFAAYGDDNFYLRWPKDKWPAEKESNAWYRRLTEFSLLSV |
| | | DLGQRDAGAFAVIGATTGKPTRPASRFIGEANGQSWHASVRATGV |
| | | LRLPGEDAHVFRSGQWQEELYGERGRSADATEWTEAKRICETLGLK |
| | | FDEILGGDPQWFSFPELNDRLLFAVRRAQTRLARLQSWSWMIADE |
| | | TRRENIREAILAADDDELSLKAAAEKSLWPVLAEKLASEVNRLRNLIP |
| | | QQLVLLANRILPLRGRRWEWIKRDDTSGCHVLRETNPGTDTTSKKV |
| | | CGQRGLSMKRLEQLDELRRRFQSLNRALMQTPGQTAGLGKSKRGI |
| | | ELPDPCPDLLDKTEQLREQRVNQTAHLILAQALGVRLRTPQKGDAL |
| | | REQNNVHGEYETFRLPVDFIVLEDLSRYLSSQGRGRNENSRLMKWC |
| | | HRAILLKLKQLCESYGLKILETNAAYSSRFCSRTGVAGFRAVELTPDAR |
| | | KEFRWRKHLNRLEKAASGEIKLDREARAESEHVKRLFDMLDQLNAG |
| | | RKEAGKPLRTLLAPIAGGQIFIPMQGHATQADINAAINLGLRAIAAP |
| | | DCHAIHVRIRTERKDKTLRVRTGSNREKVRWEGKNPEIQMNKAADL |
| | | ASLTGDRQPNFFPDPSAIACYDRAKIEGVQLPFASGRGLWGTMNIE |
| | | LQWTRVNQLNNDRAEKKWNLTRSLPEQSSEEDYIPM |
| 149 | Cas12 | MAVKSIKVKLMLGHLPEIREGLWHLHEAVNLGVRYYTEWLALLRQG |
| | | NLYRRGKDGAQECYMTAEQCRQELLVRLRDRQKRNGHTGDPGTD |
| | | EELLGVARRLYELLVPQSVGKKGQAQMLASGFLSPLADPKSEGGKG |
| | | TSKSGRKPAWMGMKEAGDSRWVEAKARYEANKAKDPTKQVIASL |
| | | EMYGLRPLFDVFTETYKTIRWMPLGKHQGVRAWDRDMFQQSLER |
| | | LMSWESWNERVGAEFARLVDRRDRFREKHFTGQEHLVALAQRLE |
| | | QEMKEASPGFESKSSQAHRITKRALRGADGIIDDWLKLSEGEPVDRF |
| | | DEILRKRQAQNPRRFGSHDLFLKLAEPVFQPLWREDPSFLSRWASY |
| | | NEVLNKLEDAKQFATFTLPSPCSNPVWARFENAEGTNIFKYDFLFDH |
| | | FGKGRHGVRFQRMIVMRDGVPTEVEGIVVPIAPSRQLDALAPNDA |
| | | ASPIDVFVGDPAAPGAFRGQFGGAKIQYRRSALVRKGRREEKAYLC |
| | | GFRLPSQRRTGTPADDAGEVFLNLSLRVESQSEQAGRRNPPYAAVF |
| | | HISDQTRRVIVRYGEIERYLAEHPDTGIPGSRGLTSGLRVMSVDLGLR |
| | | TSAAISVFRVAHRDELTPDAHGRQPFFFPIHGMDHLVALHERSHLIR |
| | | LPGETESKKVRSIREQRLDRLNRLRSQMASLRLLVRTGVLDEQKRDR |
| | | NWERLQSSMERGGERMPSDWWDLFQAQVRYLAQHRDASGEAW |
| | | GRMVQAAVRTLWRQLAKQVRDWRKEVRRNADKVKIRGIARDVP |
| | | GGHSLAQLDYLERQYRFLRSWSAFSVQAGQVVRAERDSRFAVALRE |
| | | HIDNGKKDRLKKLADRILMEALGYVYVTDGRRAGQWQAVYPPCQL |
| | | VLLEELSEYRFSNDRPPSENSQLMVWSHRGVLEELIHQAQVHDVLV |
| | | GTIPAAFSSRFDARTGAPGIRCRRVPSIPLKDAPSIPIWLSHYLKQTER |
| | | DAAALRPGELIPTGDGEFLVTPAGRGASGVRVVHADINAAHNLQRR |
| | | LWENFDLSDIRVRCDRREGKDGTVVLIPRLTNQRVKERYSGVIFTSE |
| | | DGVSFTVGDAKTRRRSSASQGEGDDLSDEEQELLAEADDARERSVV |
| | | LFRDPSGFVNGGRWTAQRAFWGMVHNRIETLLAERFSVSGAAEKV |
| | | RG |
| 150 | Cas12 | MGLVDTAGGFLIPAALDPAlLLSGDGSTNPIRQVXXXXXXXXXXXXX |
| | | XXXXXXXXXXXXXXXXXXXXXXXXXXXXXXXXXXXXXXXXXXXXXXXX |
| | | XXXXXXXXXXXXXXXXXXXXXXXXXXXXXXXXXXXXXXXXXXXXXXXX |
| | | XXXXXXXXXXXXXXXXXXXXXXXXXXXXXXXXXXXXXXXXXXXXXXXX |
| | | XXXXXXXXXXXXXXXXXXXXXXXXXXXXXXXXXXXXXXXXXXXXXXXX |
| | | XXXXXXXXXXXXXXXXXXXXXXXXXXXXXXXXXXXXXXXXXXXXXXXX |
| | | XXXXXXXXXXXXXXXXXXXXXXXXXXXXXXXXXXXXXXXXXXXXXXXX |
| | | XXXXXXXXXXXXXXXXXXXXXXXXXXXXXXXXXXXXXXXXXXXXXXXX |
| | | XXXXXXXXXXXXXXXXXXXXXXXXXXXXXXXXXXXXXXXXXXXXXXXX |
| | | XXXXXXXXXXXXXXXXXXXXXXXXXXXXXXXXXXXXXXXXXXXXXXXX |
| | | XXXXXXXXXXXXXXXXXXXPSRCRCLAFGRSSSAIRRPAASSSEGVKSL |
| | | RSVFSERSALARSTTSAIVWHTCTGMRSHPSSRAASSRRWPNTSRLS |
| | | GVTPIGCSKRQGDSPCGCCCGAHLVVAQRCVAFCCHDRGVTEKLLY |
| | | SSQVVGAAVGAGGVSVPQGVHGRVTG |
| 151 | Cas12 | MRRQHHGGQNARDWRRKVAAAALRQKESVFTYKFGLSVNDGDF |
| | | DFDAAARTYDITEGIERGSLIGLVCAVHLSGFRLFSKVAETRQFLNRS |
| | | RYPENEFAQALAAHTEIENPSVTVQSIESVFVTPPRKQDGVARLWSA |
| | | DELAKRLFQTWNNRSPREGERNHPELLLAQGIARAVTKAFSGWKEL |
| | | ADNAVHALTCADNYLATLGNRFPKLSDLPPLTAGSTQTGTLAFDPES |
| | | PFLNMTGNEDIWLHQVVAVCAGRLKRYMPEIDPSSRKFASRLTDSI |
| | | VSSQNNGLSWLFGNGLRFLRQSSIAQIAETLSVSQNEHRRVEQLKEF |
| | | ADAIPVNPFFATDGYAEFRGSVGGKISSWVSNYWKRICELTVLHSQ |
| | | PPDITIPEGLLASENATLFSGQHTAAAGLVALSARLPSQVRDAGKALF |
| | | VLSGDGVPRADDIATVEDVAGELAELTGQLAMLDNRIQQEIERAQD |
| | | ANDEGRVGSLASLRPNPTKELKEPPKLNRISGGTADAAGELARLETSL |
| | | NDLIRARREHFYRLAEWTGNTASLDPLPALAERERKALTDRGMDPT |
| | | LAEADEYALRRLLHRIAGMARRLSPNEAKRVRETMTPLFLKKREANL |
| | | YFHNRAGALYRHPFSNSRHQPYSIDLNRARATDWLAWLEERAREM |
| | | LGLLGSGAPANHEYLRDLLSIETFVFTTRLSGLPAQVPGYLAKPKSDLT |
| | | NIPPLLAAQLDVDEVSRDVALRAFNLFNSAINGLSFRAFRDSFIVRTK |
| | | FLRLGHDELFYVPKARAWKPPADYRSAKGKISKGLALPAVKRNEAGS |
| | | ILPRETTQGLSRAKFPEGSHALLSQAPHDWFVELDLRHDKMPQLAG |
| | | LPVKMNADGLKGWRARRRPTFRLAGPPSFKTWLDRALTSTAVKLG |
| | | DYTLILDQSFKQSLRVEDGEVRLSAEPAGIKAEIAVPVIDARPFPETEA |
| | | EALFDNIIGIDLGERRIGYAVFSLPALLKSGNPTRVKPTVVGSVAIPAF |
| | | RRLMAAVRRHRGSRQPNQKVSQTYSTALQQFRENVVGDVCNRID |
| | | TLCERYRAFPVLESSVANFETGANQLKLIYGTVLRRYTFSNVDAHKSA |
| | | RSAYWYSANRWQHPYLFVREWNKAQRTFTGSAKPLAIYPGVTIHP |
| | | AGTSQICHRCGRNALRALRNMPDRTIRVGKDGLIVLADSTIRLLERA |
| | | DYSDRELKTFKRRKQRPPLNMPVPEGARPRDQLERVLRRNMRQQP |
| | | QSEMSPDTTQARFTCVYTDCGFEGHADENAAVNIGRRFLERIDIEAS |
| | | SRT |
| 152 | Cas12 | MQEIKRINKIRRRLVKDSNTKKAGKTGPMKTLLVRVMTPDLRERLE |
| | | NLRKKPENIPQPISNTSRANLNKLLTDYTEMKKAILHVYWEEFQKDP |
| | | VGLMSRVAQPAPKNIDQRKLIPVKDGNERLTSSGFACSQCCQPLYV |
| | | YKLEQVNDKGKPHTNYFGRCNVSEHERLILLSPHKPEANDELVTYSL |
| | | GKFGQRALDFYSIHVTRESNHPVKPLEQIGGNSCASGPVGKALSDA |
| | | CMGAVASFLTKYQDIILEHQKVIKKNEKRLANLKDIASANGLAFPKIT |
| | | LPPQPHTKEGIEAYNNVVAQIVIWVNLNLWQKLKIGRDEAKPLQRL |
| | | KGFPSFPLVERQANEVDWWDMVCNVKKLINEKKEDGKVFWQNLA |
| | | GYKRQEALLPYLSSEEDRKKGKKFARYQFGDLLLHLEKKHGEDWGK |
| | | VYDEAWERIDKKVEGLSKHIKLEEERRSEDAQSKAALTDWLRAKASF |
| | | VIEGLKEADKDEFCRCELKLOKWYGDLRGKPFAIEAENSILDISGFSK |
| | | QYNCAFIWQKDGVKKLNLYLIINYFKGGKLRFKKIKPEAFEANRFYTV |
| | | INKKSGEIVPMEVNFNFDDPNLIILPLAFGKRQGREFIWNDLLSLETG |
| | | SLKLANGRVIEKTLYNRRTRQDEPALFVALTFERREVLDSSNIKPMNL |
| | | IGIDRGENIPAVIALTDPEGCPLSRFKDSLGNPTHILRIGESYKEKQRTI |
| | | QAAKEVEQRRAGGYSRKYASKAKNLADDMVRNTARDLLYYAVTQD |
| | | AMLIFENLSRGFGRQGKRTFMAERQYTRMEDWLTAKLAYEGLPSK |
| | | TYLSKTLAQYTSKTCSNCGFTITSADYDRVLEKLKKTATGWMTTING |
| | | KELKVEGQITYYNRYKRQNVVKDLSVELDRLSEESVNNDISSWTKGR |
| | | SGEALSLLKKRFSHRPVQEKFVCLNCGFETHADEQAALNIARSWLFL |
| | | RSQEYKKYQTNKTTGNTDKRAFVETWQSFYRKKLKEVWKPAV |
| 153 | Cas12 | MGKQSTNSSGLKATSGAPSIEKPVTTQRAYTLRLRGIEGDKTWRDSL |
| | | WATHEAINLGAKAFGDWLLTLRGGLEHTLADATVAGGKGKPARPP |
| | | SADERRDRRVLLALSWLTVEDERGAPKAPGLIVAYGDDCKSAKDSQ |
| | | DGRDRKVEDALRDILIKRSVAPGAVESWVNDCVVSLKARIRDDAVW |
| | | VNRSAAFDALRASWRGLTCPNARTVLEQFFGPVADWITLPARAAD |
| | | DGEGDTGGPTAAGSSNDTEFKLVARSFLSENFGTGLKSSKSDISDAL |
| | | MQATRSLAALRGGSPGSAVWSHLCTEFGLLAADDEARAKALRVRIG |
| | | WTSGRRSKGRLALATAASKASLAQVDIELLIKKLSEEAQEKLAGSTKL |
| | | PLPWVNDLMAALERSIGFGFVTERNLIDEFGVMLDHAARRVSIACS |
| | | WIKLAELERRQFEEDAKKLDQVRTQHADAAAFLDTLGCRRGSESGS |
| | | AGGASVVIRKRAVLGWNEVVGDWARQGCKSVQERIDAARLLQGE |
| | | LEKFGDIRLFEELAANDAQVVWQNAEGETDPTILARYSAGSVAKAN |
| | | QQRFKVPAYRHPDPLRHPVFGDFGKSRWKIDFAVHESDRAQSGGK |
| | | RVRSLDAAWQSDVRNMRMALWTGKRVEMVPLRWSSKRLSKDLG |
| | | ISDLSLKDPTVVTRGDRLGRAAVGPGDPVRVASVFAEDNWNGRLQ |
| | | APRVELNRVARLTQSGNLVQARRLRDRLSWLVSFSPKLAPSGPFIDY |
| | | AAAHGIEPHKKSGEYWPNSAMNKERKGHHSKLIYSRLPSLRVLSVDL |
| | | GHRFAAACAVWESMSAAQMRLAASKGKVVRGGIAEGALFIHIEST |
| | | VADGTVRTTVYRRIGEDALPDGSPHPAPWAKLERQFLIKLQGEETPS |
| | | RMAALDELVMIADWERALGYQPVTASSTKQSNGVAGLMGRTVRL |
| | | FMHASRRHFDRARIAHNLTAEHRTKPGGVPESLTEETRIELLIDTLAL |
| | | WHGLFAGDRWRDPRAQKEWETSGLPSLKLPGRGDDDETAFGGPG |
| | | RKAAMVVYRNELKPHAERMAHSDLSNLSKCWTDRWAQDDREWT |
| | | AKSGRLRSLRRWITPRGLRPVSGDSAQLIERKAAAALRARHVGGLS |
| | | MQRINTLTDLYRLLKSFKNRPEPSNLRKNIPEKGDARLIGFNQRLLDV |
| | | RDRLREQRVKQLASRIVEAALGIGRIKIRRVAAGSPRPTLRVDAACHA |
| | | VVTENLSNYQPAELQTRRENRQLMAWASSKVHKYLAESCQLHGLH |
| | | LREVQPNYTSRQCSRTGAAGLRGvAVSATDLLTNPWWMRDVAQA |
| | | KARIEKALKNGRNGAVADQLLVSAEAWALRIPERDRHDRKADESVK |
| | | AFHAERVILPRKGGDLFVAESARCNGKGHVPALQADLNAAANVGIR |
| | | ALLDPDWPGKWWWVPCVGGTYSPSPEKTSGAKVLEHIDQLPHEM |
| | | VDPPQVAPKSSAPQPKSSRAAKVKAKEFRAIENRWRTCSSELLSQGK |
| | | WIPSGEYWSKVEAAVCLVLNDQIT |
| 154 | Cas12 | MAAFQRSYTMNLKPATSEQDKFILWNRLFLTHWSVNEGAKIFGELF |
| | | LNLRGGLSPELDIFDLDKVKDDKKKKAFVMGRRRLLALGWLSVEDN |
| | | LSAGEHPFRIREIPVGRNMGKSQASTLLTEILKNKGIKDEAVIKEWID |
| | | DCTPSLIANIREDAVWINRASSFNSITPCPTKDEVWIVLSGLLGLRFLD |
| | | LSLEEVKGKETEYLYDLGEKETQSKSDPSKKARELFGNLFTQNPVLMK |
| | | NSRDKKDTFAKEFYLAFKEFKDYEKLKEKIESWRKEKEFPLIENPVAEK |
| | | YPPEVTFTGSPCTVSKRYRKLLVSLELWPSSQDENGNIPKTEKTEDKT |
| | | HNQVLLDYLLKACNEGNKGTQKHTPVWANNLKAELELKMNEIIRIG |
| | | ESSSTELQRLMIKMAARRISQTLSWIKINEQTKHDAYQKKNKAFKLL |
| | | SEIDKNGEACKWLENYELFRTDDSGGEEYHISLRAISCWKQILEEWQ |
| | | KNDSPKALREKVKEVQAEEEKFGDARLFEDLADDNARSVWLLPDG |
| | | NKTPDILNWWCEYRTAEIDESRFKIPCYCHPHPFKHPVYVEYGKSNP |
| | | KVIFAMKNNKVKKGHIEHGWNPQNPRSIALSLFNNGNRESSLVPFI |
| | | WESKRLWKDLGGEATQIGDIPRSDRMGLSGKRESVKPKAPFQKEV |
| | | WNARLQSDRRTLEKLEKYWNPESMKWIDDGKFLIQSKWFITFGPD |
| | | METAEGPWKLYLKEKYVDNKILGNRSKENQKRGYRAKKLLSGYPAG |
| | | MRILSVDLGHRYAASCAVWETITKKQITEELAYQPDNNSLFEHSCKTI |
| | | DKKIKNTVYRRIGEDSIDAPWAKLEKQFTIKLQGEDKSCYLLRSDEKE |
| | | LFRSILSKLSCLNNDTGHNILEMIENLLRIVKAKIYRQGILARISYSMTA |
| | | QYKPGKGGQKSPLSDEDKIHYLSENLAAWSAIMGNQEWNEDVISD |
| | | WYKTYISHLVSGPKPKEGNRKSDRDKIIEYFLPAARKLYDDNETRIKIH |
| | | DLFKELWDENNKQLSAVLKEIKKIILPKGIRYFDKNTDNPSKWKNNQ |
| | | SKLKQITHRGGLSMQRIVAIEEYYKLAKAYKNHPEPDDLTKNIPLPGD |
| | | NSSAGFNQRIRDTLERMKEQRVKQIASRIVESALGLGIEGYKKRPLTP |
| | | ENKPCQAIVIEDLSHYRPDELQTRRENRRLMQWSSSKVKKYLKEACE |
| | | MHDVRLVEISPEYTSRQDSRTGAAGLRCIDINIREFLKDSSRWQNKI |
| | | NTIQKKPANKKSNLDQYLIELNESLGNKYKDKVIPSDNFVRIPRKGGD |
| | | VFVSSSKESPVSKGIQADLNAAANIGLKALLDPDWAGAWWYILIEV |
| | | KSNHVIPYGEKYKGSECLRAWKFSGLENQVMKNNMNLWRDLOSQ |
| | | FSGEDKWMSYKEYNELTEKRVINILRERAGLELIKE |
| 155 | Cas12 | MEDYSGFVNIYSIQKTLRFELKPVGKTLEHIEKKGFLKKDKIRAEDYKA |
| | | VKKIIDKYHRAYIEEVFDSVLHQKKKKDKTRFSTQFIKEIKEFSELYYKT |
| | | EKNIPDKERLEALSEKLRKMLVGAFKGEFSEEVAEKYKNLFSKELIRNE |
| | | IEKFCETDEERKQVSNFKSFTTYFTGFHSNRQNIYSDEKKSTAIGYRII |
| | | HQNLPKFLDNLKIIESIQRRFKDFPWSDLKKNLKKIDKNIKLTEYFSID |
| | | GFVNVLNQKGIDAYNTILGGKSEESGEKIQGLNEYINLYRQKNNIDR |
| | | KNLPNVKILFKQILGDRETKSFIPEAFPDDQSVLNSITEFAKYLKLDKKK |
| | | KSIIAELKKFLSSFNRYELDGIYLANDNSLASISTFLFDDWSFIKKSVSFK |
| | | YDESVGDPKKKIKSPLKYEKEKEKWLKQKYYTISFLNDAIESYSKSQDE |
| | | KRVKIRLEAYFAEFKSKDDAKKQFDLLERIEEAYAIVEPLLGAEYPRDR |
| | | NLKADKKEVGKIKDFLDSIKSLQFFLKPLLSAEIFDEKDLGFYNQLEGY |
| | | YEEIDSIGHLYNKVRNYLTGKIYSKEKFKLNFENSTLLKGWDENREVA |
| | | NLCVIFREDQKYYLGVMDKENNTILSDIPKVKPNELFYEKMVYKLIPT |
| | | PHMQLPRIIFSSDNLSIYNPSKSILKIREAKSFKEGKNFKLKDCHKFIDF |
| | | YKESISKNEDWSRFDFKFSKTSSYENISEFYREVERQGYNLDFKKVSKF |
| | | YIDSLVEDGKLYLFQIYNKDFSIFSKGKPNLHTIYFRSLFSKENLKDVCL |
| | | KLNGEAEMFFRKKSINYDEKKKREGHHPELFEKLKYPILKDKRYSEDK |
| | | FQFHLPISLNFKSKERLNFNLKVNEFLKRNKDINIIGIDRGERNLLYLV |
| | | MINQKGEILKQTLLDSMQSGKGRPEINYKEKLQEKEIERDKARKSW |
| | | GTVENIKELKEGYLSIVIHQISKLMVENNAIVVLEDLNIGFKRGRQKVE |
| | | RQVYQKFEKMLIDKLNFLVFKENKPTEPGGVLKAYQLTDEFQSFEKL |
| | | SKQTGFLFYVPSWNTSKIDPRTGFIDFLHPAYENIEKAKQWINKFDSI |
| | | RFNSKMDWFEFTADTRKFSENLMLGKNRVWVICTTNVERYFTSKT |
| | | ANSSIQYNSIQITEKLKELFVDIPFSNGQDLKPEILRKNDAVFFKSLLFYI |
| | | KTTLSLRQNNGKKGEEEKDFILSPVVDSKGRFFNSLEASDDEPKDAD |
| | | ANGAYHIALKGLMNLLVLNETKEENLSRPKWKIKNKDWLEFVWER |
| | | NR |
| 156 | Cas12 | MKRIAKFRHDKPVKREAWSKGYRVHKNRIINKVTRSIKYPLVVKDE |
| | | WKKRLIDDAAHDYRWLVGPINYSDWCRDPNQYSILEFWIDFLCVG |
| | | GVFQSSHSNICRLAIQLSGGSVFEQEWKDLSPFVRANLIQGIKPAEFI |
| | | GFLTAEFRSSSNPKNFISKFFEGSNEDLESLTNEFASIVDFIKAKDISLLR |
| | | KSLPSCKKIAPNLWEKAVGSHSTNELLKLLTKYTRVMLVAEPSHSDR |
| | | VFSQTVLQSNDQDDPELTGPLPSHKVGKASYLFIPEFIREVNLDKISKL |
| | | DLSAKSKLAVEQVKKLSELTSDFKQIENQSEAYFGLSTSFNELSNFLGI |
| | | LIRTLRNAPEAILKDQIALCAPLDKDILKITLDWLCDRAQALPENPRFE |
| | | TNWAEYRSYLGGKIKSWFSNYENFFEIPQAASSQQNNNREKKLGNR |
| | | SAIRALNLKKEAFEKARETFKGDKGTLEKIDLAYRLLGSISPEVLQCDE |
| | | GLKLYQQFNDELLVLNETINQKFQDAKRDIKAKKEKESFEKLQRNLSS |
| | | PLPRIPEFFGERAKKGYQKARVSPKLARHLLECLNDWLARFAKVEES |
| | | AFSEKEFQRILDWLRTSDFLPVFIRKSKDPPSWLRYIARVATGKYYFW |
| | | VSEYSRKRVQJIDKPIAQNPLKELISWFLLNKDAFSRDNELFKGLSSK |
| | | MVTLARIMAGILRDRGEGLKELQAMTSKLDNIGLLHPSFSVPVTDSL |
| | | KDAAFYRAFFSELEGLLNIGRSRLIIERITLQSQQSKNKKTRRPLMPEP |
| | | FINEDKEVFLAFPKFETKNKVKGTRVVYNSPDEVNWLLSPIRSSKGQL |
| | | SFMFRCLSEDAKIMTTSGGCSYIVEFKKLLEAQEEVLSIHDCDIIPRAF |
| | | VSIPFTLERESEETKPDWKPNRFMGVDIGEYAVAYCVIEKGTDSIEIL |
| | | DCGIVRNGAHRVLKEKVDRLKRRQRSMTFGAMDTSIAAARESLVG |
| | | NYRNRLHAIALKHGAKLVYEYEVSAFESGGNRIKKVYETLKKSDCTGE |
| | | TEADKNARKHIWGETNAVGDQIGAGWTSQTCAKCGRSFGADLKA |
| | | GNFGVAVPVPEKVEDSKGHYAYHEFPFEDGLKVRGFLKPNKIISDQK |
| | | ELAKAVHAYMRPPLVALGKRKLPKNARYRRGNSSLFRCPFSDCGFT |
| | | ADADIQAAYNIAVKQLYKPKKGYPKERKWQDFVILKPKEPSKLFDKQ |
| | | FYRPN |
| 157 | Cas12 | MAIRSIKLKLKTHTGPEAQNLRKGIWRTHRLLNEGVAYYMKMLLLF |
| | | RQESTGERPKEELQEELICHIREQQQRNQADKNTQALPLDKALEALR |
| | | QLYELLVPSSVGQSGDAQIISRKFLSPLVDPNSEGGKGTSKAGAKPT |
| | | WQKKKEANDPTWEQDYEKWKKRREEDPTASVITTLEEYGIRPIFPLY |
| | | TNTVTDIAWLPLQSNQFVRTWDRDMLQQAIERLLSWESWNKRVQ |
| | | EEYAKLKEKMAQLNEQLEGGQEWISLLEQYEENRERELRENMTAA |
| | | NDKYRITKRQMKGWNELYELWSTFPASASHEQYKEALKRVQQRLR |
| | | GRFGDAHFFQYLMEEKNRLIWKGNPQRIHYFVARNELTKRLEEAKQ |
| | | SATMTLPNARKHPLWVRFDARGGNLQDYYLTAEADKPRSRRFVTF |
| | | SQLIWPSESGWMEKKDVEVELALSRQFYQQVKLLKNDKGKQKIEFK |
| | | DKGSGSTFNGHLGGAKLQLERGDLEKEEKNFEDGEIGSVYLNVVIDF |
| | | EPLQEVKNGRVQAPYGQVLQLIRRPNEFPKVTTYKSEQLVEWIKASP |
| | | QHSAGVESLASGFRVMSIDLGLRAAAATSIFSVEESSDKNAADFSYW |
| | | IEGTPLVAVHQRSYMLRLPGEQVEKQVMEKRDERFQLHQRVKFQI |
| | | RVLAQIMRMANKQYGDRWDELDSLKQAVEQKKSPLDQ.TDRTFWE |
| | | GIVCDLTKVLPRNEADWEQAVVQIHRKAEEYVGKAVQAWRKRFAA |
| | | DERKGIAGLSMWNIEELEGLRKLLISWSRRTRNPQEVNRFERGHTS |
| | | HQRLLTHIQNVKEDRLKQLSHAIVMTALGYVYDERKQEWCAEYPAC |
| | | QVILFENLSQYRSNLDRSTKENSTLMKWAHRSIPKYVHMQAEPYGI |
| | | QIGDVRAEYSSRFYAKTGTPGIRCKKVRGQDLQGRRFENLQKRLVN |
| | | EQFLTEEQVKQLRPGDIVPDDSGELFMTLTDGSGSKEVVFLQADINA |
| | | AHNLQKRFWQRYNELFKVSCRVIVRDEEEYLVPKTKSVQAKLGKGLF |
| | | VKKSDTAWKDVYVWDSQAKLKGKTTFTEESESPEQLEDFQEIIEEAE |
| | | EAKGTYRTLFRDPSGVFFPESVWYPQKDFWGEVKRKLYGKLRERFL |
| | | TKAR |
| 158 | Cas12 | MTHAKKIPFPVLKRSTLRKARQRIAAGSITAGERPFNSTVTRVVPVK |
| | | DPVSDQVWAVAREAAMTLRGFGQGSLFDMLIHLHADGFRLFPSG |
| | | REREAFFLKDLFDPTEFDDGARRAFGDVMPGFTANSLREILGAPARK |
| | | CGKVTSVEILLPRLSKGLGVKKSAAPPEVLSSLAAALCEAFPTWSLLTA |
| | | VDGGVGKVIDDVLRTHGSRLPSLEKAWSTNLPEVPKGLGVPTLAFD |
| | | DQAPAQSEQTPTGRFAGVVARYLAETFASNPEATAGDASKAVQAK |
| | | VTTPNGNALSWLFAVGRRAMCSTTLDELAIGLNITSPRGRHALSSLK |
| | | ERMMALPALSVLGERAYPDSRATLQGTVDSLIANYVNRLFELSSSAT |
| | | SIAQTKLILPAAIQGDTAVFDGMPFSAEDVGALFEQLPSEIAKLEHAV |
| | | KVLVGKERTSTLGYQKAVDDVDEFGVWASSVDAVIGQINARLKTLE |
| | | RAQEPLGKLMGDGKLKRLVNIHEPEGPAVEIIPVLDQELQDVLTSCR |
| | | TAFADLEARYPMTVAKAQRHAEAEVRNALELASRKEGGLSLASADV |
| | | PALAKRKILEPIISIARRSSPAMATAVLTECLRQKLIVKGTGSERSLRGY |
| | | VLSGEQVIYAHPLSRRRSIVRLDREGLQNFDALEFLDALQKDATQRT |
| | | NVRESLIVEMARQSLLLSALPDRIEIGAISWQTPSQNQHAPWANLR |
| | | PVNGTVGRSETIKSFTAVFHSRISGLLYRLNRQKFMEKYDLRCFIGSTL |
| | | LFSPKNADWAPPPQYRHGRFSALLARSDFPWEGAEGTHANAVRLA |
| | | KFLIDETRNATDLQQAIAAKALLAQLPHDWVVCCDFDGAPSYEGAF |
| | | VSAGEVSAWAKRSGYLLTPPRHFAGAFLEGFKSTKISPHGLTFERML |
| | | ERDGDSVIETGRRVTAAFPITQEVAPAAQPWKPRHLAGLDLGEAGL |
| | | GVCLKNLDNGHEQTLLLKTRKTRLLAHSAEHYRRKDQPRQVFRKQY |
| | | NQSSENAIKAAIGEVCGLIDNLIARYDAVPVFESQAAAARGSNRMV |
| | | ARVYAGVLQRYTYVVGNGAADATRTSHWLGANRWSYSFGADVIP |
| | | KVRDLSPEVLRSIKKPENVFRDALGFPGVLANAWRTSMICSVCGTDP |
| | | IGALEEAIAANQISFVTDNEGEGSLDLGDGRKVTLRVEVPTSSALTKR |
| | | EASRRKRRAPWEAKVGTVWTLTRKSHRDDLLTTIRRSLRRPSSTFQG |
| | | STTKQWEFHCPCCGQIQQADVNAASNLVRRYFVRASDNARARQH |
| | | WADDSKRLAFIASMGPDRSAREEKVS |
| 159 | Cas12 | MNRIYQGRVTKVEKLKNGKSPDDREELKDWQTALWRHHELFQDA |
| | | VSYYTLALAAMAEGLPDKHPINVLRKRMEEAWEEFPRKTVTPAKNL |
| | | RDSVRPWLGLSESASFGDALKKILPPAPENKEVRALAVALLAEKARTL |
| | | KPQKTSASYWGRFCDDLKKKPNWDYSEEELARKTGSGDWVAGLW |
| | | SEDALNKIDELAKSLKLSSLVKCVPDGQINPEGARNLVKEALDHLEGV |
| | | SNGTKKEKNDPGPAKKTNNWLRQHASDVRNFIHKNKNQFSSLPNG |
| | | RLITERARGGGININKTYAGVLFKAFPCPFTFDYVRAAVPEPKVKKVD |
| | | QEKKSEQSATWTELEKRILRIGDDPIELARKNNKPIFKAFTALEKWSD |
| | | QNSKSCWSDFDKCAFEEALKTLNQFNQKTEEREKRRSEAEAELKYM |
| | | MDENPEWKPKKETEGDDVREVPILKGDPRYEKLVKLFGDLDEEGSE |
| | | HATGKIYGPSRASLRGFGKLRNEWVDLFTKANDNPREQDLQKAVT |
| | | GFQREHKLDMGYTAFFLKLCERDYWDIWRDDTEVEVKKIREKRWV |
| | | KSVVYAAADTRELAEELERLQEPVRYTPAEPQFSRRLFMFSDIKGKQ |
| | | GAKHIREGLVEVSLAVKDQSGKYGTCRVRLHYSAPRLIRDHLSDGSS |
| | | SMWLQPMMAALGLSSDARGCFTRDSKGNVKEPAVALMSDFVGR |
| | | KRELRMLLNFPVDLDISKLEENIGKKARWEKQMNTAYEKNKLKQRF |
| | | HLIWPGMELKETQEPGQFWWDNPTIQKEGMYCLAIDLSQRRAAD |
| | | YALLHAGVNRDSKTFVELGQAGGQSWFTKLCAAGSLRLPGEDTEVI |
| | | REGKRQIELSGKKGRNATQSEYDQAIALAKQLLHNENSAELESAARD |
| | | WLGDNAKRFSFPEQNDKLIDLYYGALSRYKTWLRWSWRLTEQHKE |
| | | LWDKTLDEIRKVPYFASWGELAGNGTNEATVQQLQKLIADAAVDL |
| | | RNFLEKALLHIAYRALPLRENTWRWIENGKDGKGKPLHLLVSDGQS |
| | | PAEIPWLRGQRGLSIARIEQLENFRRAVLSLNRLLRHEIGTKPEFGSST |
| | | CGESLPDPCPDLTDKIVRLKEERVNQTAHLIIAQSLGVRLKGHSLFTEE |
| | | REKADMHGEHEVIPGRSPVDFVVLEDLSRYTTDKSRSRSENSRLMK |
| | | WCHRKINEKVKLLAEPFGIPVIEVFASYSSKFDARTGAPGFRAVEVTS |
| | | EDRPFWRKTIEKQSVAREVFDCLDNLVGKGLNGIHLVLPQNGGPLFI |
| | | AAVKEDQPLPAIRQADINAAVNIGLRAIAGPSCYHAHPKVRLIKGES |
| | | GTDKGKWLPRKGKEANKRENAQFGNVDLDLEVKFNRLDIDSDVLK |
| | | GDNTNLFHDPLNIACYGFATIQNLQHPFLAHASAVFSRQKGAVARL |
| | | QWEVCRAINSRRLEAWQKKAEKAAVKR |
| 160 | Cas12 | MSHELAEQPSPPKNKEPTCEESDAIRKNRRILLALSWLSVEDDCSAP |
| | | TGTFRVASGKDSEAERKNKVLTAFRSILTARRMRSQDVESWIADCA |
| | | ASLSAKIREDAVWINRSACFDQRALDLKVLSREYAKAAVMSFFGPLD |
| | | EYFKLPDEADDTKPAVGGDGPDFRTLARQWVSTNFGTGKKSDSEAI |
| | | AQNLRKLADANI.APFSGKPKAALIAHLSVELDGSTADIDGLCRAIGW |
| | | NTGRPSKGRVAIERLPDPPTETSIQTMQQKFREEAEAKASSKGLRQ.V |
| | | PEWMPAFQKSIERDCGMPFKLGEGRDHIGEFSVMLDHAARRVSIG |
| | | HSWIKRAEAERRRFEADAQRLNHIPAAAKDWLDQFVQFRSGSSGA |
| | | AAAGGEYRIRRRAIEGWDEIIKRWKRAACKSPEDRVAAAREVQADP |
| | | EIEKFGDIQLFEALAADDAECVWRGDGNGTPDPLKDYVAATDALDK |
| | | MRRFKVPAYRHPDPLAHPVFGDFGNSRGDIRFAVHEAAKATRGTK |
| | | RIAKDQKEWIRERHGLRMGLWDGQSVRTADLRWSSKRLVDDLALR |
| | | NHVTTRRTGPVSRADRLGRAAAGLGADEAACVAGLFELPDWNGRL |
| | | QAPRAQLDAIAACVAANGGKWDDKARKLRDRIEWLVSFSAKLECC |
| | | GPFMEYASQNGIQPNGKGEYYPHAERNKGRTGHAKLILSRLPGLRV |
| | | LAVDLGHRFAAACAVWEALSKIAFDAETKGREVVSGGRAADDLYC |
| | | HTRHLDCAGKARTTIYRRIGPDKLPDGSDHPAPWARLDRQFLIKLO |
| | | GEERPARAAGPAETAAVQQIETDLGRARGQEDLPPRPVDSLMREA |
| | | VRTIRIALRRHGDAARIAYAFKPGAKRLKPGGGAQDHTPETHADAIL |
| | | EALLRWHELATGARWRDPWAETQWKDWVQPHISATLPELANDA |
| | | DRWERKRHRAALEQVLRPVAQMLIQRPTDALHQVWSKHWADED |
| | | LKWPSRLRWLRNWLLPRGPRARSGAARNVGGLSLLRIATLRELYQT |
| | | QKAYAMRPEPDDPRKRIAGRNDDRYDELGRSVLQVIERLREQRVK |
| | | QLASRIVEAALGVGRAKPTRGRQRPQSRVDVPCHAVIIESLRNYRPD |
| | | ELQTRRENRAIMNWSAGKVRKYLEEACQLHGLHLREVMPNYTSRE |
| | | DSRTGLPGVRCVDVPVDPKLGKPKAYWWNSVLSTARKKSIGDAAS |
| | | HDKQGDATSRFIVELAGCLDRLKADGKPLPKTVRVPRIGGDLFVAAP |
| | | PTSCTAPAHQPHPACDGARALQADLNAAANIGLRALLDPDFPAKW |
| | | WYVPCIDDQRGLALPRADKVLGSACFPGDPATFGSLLKTRTAAGPA |
| | | VDGQAAPDRKPRTGTHRPGSAKSRSLGDGKATTNYWSDRSARDLR |
| | | PADEGGHWQPTNVYWNWVRKRALLGLYSFNGLSPPSDDRP |
| 161 | Cas12 | MAIRSIKLKLKTNTGPEAQNLRKGIWRTHRLLNEGVAYYMNMLLLF |
| | | RQESTDKKTKQEIHEELIRHIRAQQQRNHADEKTQALPLEKALEALR |
| | | KLYELLVPSSVGQSGDSQIISRKFLSPLVDPNSEGGKGTSKAGAKPA |
| | | WQKKKEANDPTWKQDYEKWKKRREEDPTASVITTLEEYGIRPLFPL |
| | | YTNTVAEIAWLPLKSGQFVRTWDRDMFQQAIEGMLSWESWNRR |
| | | VQEEYAKLEGKMAQLNEQLEGGEEWIRLLEQYEEKREQELRENMT |
| | | AANDKFRITKRQMKGWKELYEVWSTFLPSASQEQYKEAIKRVQQR |
| | | LRGKFGDFHFFQYLSEEENRLIWKGNPQRIHYFVARNELTKKLEKAK |
| | | QSARRTLPDANKHPLWVRYDARGGNLQDYYLTAESDKPRSRRFVTF |
| | | SQLIWPSESGWLEKKDVQAELALSRQFYQQVTFLKNDKGKQEIEFK |
| | | DKGSGTTFSGHLGGAKLQLERSVLENKERKFEEGEIGKAYLNVAIDFK |
| | | PLQEVKNGRVQAPYGQVLQLIRLPNAFPKVRTYKSEELVEWIKASPQ |
| | | HLSGVESLASGFRVMSIDLGLRAAAATSIFSVEESSDKNATKLAYWIE |
| | | GTPLVAVHQRSYMLRLPGEQVEQHVWEKRDERGDQHKRVRFQIR |
| | | RLAEIIRLANKQYGDRWDELNRLDEAVSKEKSPLDQADRTFWEGIVS |
| | | DLTTALPLNDADWTEAVVOIHRKAELYVGKWQAWRKRFNADERK |
| | | GIAGLSMWSIEELDGLRKLLISWSRRTRNPQEVNRFEPEHTGHKRLL |
| | | THIQNVKKDRLKQVSHAIVMTALGYIYDEKKQKWCAKYPACQVILF |
| | | ENLSQYRSNLDRSAKENSTLMKWAHRSIPKYVHMQAEPYGIQIGD |
| | | VRAEYSSRYYAKTGTPGIRCKKLREHDVKGWRLDHLKKRLVNEQFLT |
| | | EAQVEQLKAGDIIPDDSGELFMTMTDGSGGKEIVFLQADINAAQNL |
| | | QKRFWQRNSELFKVSCRVIVRDEAEYLVPQAKKVQEKLGKGVFVKK |
| | | SDTAWKEVYVWDSQAKLKGKTTFTEESESPEQLEDLQEMIEEAEEA |
| | | KGTYRTLFRDPSGVFFPDFVWNTPKDFWGEVKRKLYGKLRERLLTK |
| | | VR |
| 162 | Cas12 | MNRIYQGRVTKVEVPDGKDEKGNIKWKKLENWSDILWQHHMLF |
| | | QDAVNYYTLALAAISGSAVGSDEKSIILREWAVQVQNIWEKAKKKA |
| | | TVFEGPQKRLTSILGLEQNASFDIAAKHILRTSEAKPEQRASALIRLLEE |
| | | IDKKNHNVVCGERLPFFCPRNIQSKRSPTSKAVSSVQEQKRQEEVRR |
| | | FHNMQPEEVVKNAVTLDISLFKSSPKIVFLEDPKKARAELLKQFDNA |
| | | CKKHKELVGIKKAFTESIDKHGSSLKVPAPGSKPSGLYPSAIVFKYFPV |
| | | DITKTVFLKATEKLAMGKDREVTNDPIADARVNDKPHFDYFTNIALI |
| | | REKEKNRAAWFEFDLAAFIEAIMSPHRFYQDTQKRKEAARKLEEKIK |
| | | AIEGKGGQFKESDSEDDDVDSLPGFEGDTRIDLLRKLVTDTLGWLGE |
| | | SETPDNNEGKKTEYSISERTLRIFPDIQKQWSELAEKGETTEGKLLEVL |
| | | KHEQTEHQSDFGSATLYQHLAKPEFHPIWLKSGTEEWHAENPLKA |
| | | WLNYKELQYELTDKKRPIHFTPAHPVYSPRYFDFPKKSETEEKEVSKN |
| | | THSLTTSLASEHIKNSLQFTAGLIRKTNVGKKAIKARFSYSAPRLRRDC |
| | | LRSENNENLYKAPWLQPMMRALGIDEEKADRQNFANTRITLMAK |
| | | GLDDIQLGFPVEANSQELQKEVSNGISWKGQFNWGGIASLSALRW |
| | | PHEKKPKNPPEQPWWGIDSFSCLAVDLGQRYAGAFARLDVSTIEKK |
| | | GKSRFIGEACDKKWYAKVSRMGLLRLPGEDVKVWRDASKIDKENG |
| | | FAFRKELFGEKGRSATPLEAEETAELIKLFGANEKDVMPDNWSKELS |
| | | FPEQNDKLLIVARRAQAAVSRLHRWAWFFDEAKRSDDAIREILESD |
| | | DTDLKQKVNKNEIEKVKETIISLLKVKQELLPTLLTRLANRVLPLRGRS |
| | | WEWKKHHQKNDGFILDQTGKAMPNVLIRGQRGLSMDRIEQITELR |
| | | KRFQALNQSLRRQIGKKAPAKRDDSIPDCCPDLLEKLDHMKEQRVN |
| | | QTAHMILAEALGLKLAEPPKDKKELNETCDMHGAYAKVDNPVSFIVI |
| | | EDLSRYRSSQGRSPRENSRLMKWCHRAVRDKLKEMCEVFFPLCERR |
| | | KAGSAWVSLPPLLETPAAYSSRFCSRSGVAGFRAVEVIPGFELKYPW |
| | | SWLKDKKDKAGNLAKEALNIRTVSEQLKAFNQDKPEKPRTLLVPIAG |
| | | GPIFVPISEVGLSSFGLKPQVVQADINAAINLGLRAISDPRIWEIHPRL |
| | | RTEKRDGRLFAREKRKYGEEKVEVQPSKNEKAKKVKDDRKPNYFAD |
| | | FSGKVDWGFGNIKNESGLTLVSGKALWWTINQLQWERCFDINKRH |
| | | IEDWSNKQKQ |
| 163 | Cas12 | MGEENNFSQFTGLYELSKTLRFELKPVWETEKLLIENQVFPKDKIVYE |
| | | SYKKIRPYLDKLHLQFIEESLSSVKLDFNEIEKKFLEWDKEKDKTTKNKL |
| | | KEEIFWKNKKWWLNSNLRKDMVSYFNLNWKKWINNFENKTIVNE |
| | | KWKEEKIKIKWEWYKILLSDSNLNILSDFFTQEKEWDNVLIEKYIENP |
| | | NFKENDWEKKFILEKQNLFKSFKWFTTYFTNFNHSRENFYKDDWKS |
| | | WRIATRIIDENLIFFLKNKKAFDEKYKNNSEITVKFNEKLLNFWEKLED |
| | | FFSLDFYNRCYTWKQIEYYNQLIWELNSVVNHEKQAKFSEYTQNKK |
| | | VSENNKFNKYDFPIFKELYKQILSEKATEQKFIEINDFKELKQNLQELIE |
| | | KNKQKNKFAINLTKSLIEKIDEYDFEKIYISKLSLNTISSKFFWSNKWFFI |
| | | QENLEKNIWKKNKNWKIDLPDFIKLSDIKTALENFNKILFEDKENKEN |
| | | IFKEEFDNITENNIFIKFMKIYENEFINLIEWKKNNKWDYEIIWYNKSL |
| | | LDLEKNILNISDFSDKKEEKEKQIEYIKKYLDSSLNIYRVMKYFALEKGK |
| | | ESVEWEFETDDIFYNEFKKFYIDNEIISYYNEFRNYLTKKPYSSNKLKLN |
| | | FENWTLIDGWDKNKEPDNYWTILRKNWKYFLALQIKWKNNIFYKK |
| | | KWSWVIDIEEAYKIDLWDEFYEKMDYKFLPDPKKMLPKVIFAKSNV |
| | | KLFNPSKEILQIKENETFKTWDKFKVNDFYKIVDFYKENIIKYPDWKIF |
| | | NFKFSDTKTYNNLSDFYKEIELWSYDLNFRKVSKKYILKSIEEKNIYLFEI |
| | | YNKDFADWKTWSENLHTMYFKWLFEENNLNNIVLKLNWQAEIFR |
| | | REASLKEKEVNRAKENKEKSHNIIENARYTKDKLFFHCPIKLNFAKHN |
| | | EKINQEILKYISDNKEINIIWIDRWEKHLAYYSVINRDWNIIKDKNWN |
| | | LVKWSLNIVWNNQNYHDKLETREKERQDARWSWKTIWNIKDLKQ |
| | | GYISQVVHKLAELVIEHNAIIVFEDLNSWFKRWRQKIERQVYQKLEK |
| | | ALIEKLNYLTFKDKNFWENWHYLKAYQLTAPFETFEKVWKQTWVIF |
| | | YTDPSYTSSTCPACWFRKDLYLKYSNLKNALWDIEKIDSIIFDWKRFIF |
| | | EYNNKKVFTDRDRKRNISSEESWIKWWKTIDNNITEFLEILFKKSNID |
| | | YTSWNNLILDIQEINEKELYKWVFDNFNAILNIRNSTIKDNSRTWDFI |
| | | CCPACDFDSRKENKIWIENWDDNWAFNIARKWIIILNKIDSYLNEK |
| | | WSLDKILWWDMIVKQIDWDDFTHKK |
| 164 | Cas12 | MAQASSTPAVSPRPRPRYREERTLVRKLLPRPGQSKQEFRENVKKLR |
| | | KAFLQFNADVSGVCQWAIQFRPRYGKPAEPTETFWKFFLEPETSLP |
| | | PNDSRSPEFRRLQAFEAAAGINGAAALDDPAFTNELRDSILAVASRP |
| | | KTKEAQRLFSRLKDYQPAHRMILAKVAAEWIESRYRRAHQNWERN |
| | | YEEWKKEKQEWEQNHPELTPEIREAFNQIFQQLEVKEKRVRICPAA |
| | | RLLQNKDNCQYAGKNKHSVLCNQFNEFKKNHLQGKAIKFFYKDAEK |
| | | YLRCGLQSLKPNVQGPFREDWNKYLRYMNLKEETLRGKNGGRLPH |
| | | CKNLGQECEFNPHTALCKQYQQQLSSRPDLVQHDELYRKWRREYW |
| | | REPRKPVFRYPSVKRHSIAKIFGENYFQADFKNSVVGLRLDSMPAGQ |
| | | YLEFAFAPWPRNYRPQPGETEISSVHLHFVGTRPRIGFRFRVPHKRS |
| | | RFDCTQEELDELRSRTFPRKAQDQKFLEAARKRLLETFPGNAEQELR |
| | | LLAVDLGTDSARAAFFIGKTFQQAFPLKIVKIEKLYEQWPNQKQAGD |
| | | RRDASSKQPRPGLSRDHVGRHLQKMRAQASEIAQKRQELTGTPAP |
| | | EIIIDQAAKKATLQPFDLRGLTVHTARMIRDWARLNARQIIQLAEE |
| | | NQVDLIVLESLRGFRPPGYENLDQEKKRRVAFFAHGRIRRKVTEKAV |
| | | ERGMRVVTVPYLASSKVCAECRKKQKDNKQWEKNKKRGLFKCEGC |
| | | GSQAQVDENAARVLGRVFWGEIELPTAIP |
| 165 | Cas12 | MGEENNFSQFTGLYELSKTLRFELKPVWETEKLLIENQVFPKDKIVYE |
| | | SYKKIRPYLDKLHLQFIEESLSSVKLDFNEIEKKFLEWDKEKDKTTKNKL |
| | | KEEIFWKNKKWWLNSNLRKDMVSYFNLNWKKWINNFENKTIVNE |
| | | KWKEEKIKIKWEWYKILLSDSNLNILSDFFTQEKEWDNVLIEKYIENP |
| | | NFKENDWEKKFILEKQNLFKSFKWFTTYFTNFNHSRENFYKDDWKS |
| | | WRIATRIIDENLIFFLKNKKAFDEKYKNNSEITVKFNEKLLNFWEKLED |
| | | FFSLDFYNRCYTWKQJEYYNQLIWELNSVVNHEKQAKFSEYTQNKK |
| | | VSENNKFNKYDFPIFKELYKQILSEKATEQKFIEINDFKELKQNLQELIE |
| | | KNKQKNKFAINLTKSLIEKIDEYDFEKIYISKLSLNTISSKFFWSNKWFFI |
| | | QENLEKNIWKKNKNWKIDLPDFIKLSDIKTALENFNKILFEDKENKEN |
| | | IFKEEFDNITENNIFIKFMKIYENEFINLIEWKKNNKWDYEIIWYNKSL |
| | | LDLEKNILNISDFSDKKEEKEKQIEYIKKYLDSSLNIYRVMKYFALEKGK |
| | | ESVEWEFETDDIFYNEFKKFYIDNEIISYYNEFRNYLTKKPYSSNKLKLN |
| | | FENWTLIDGWDKNKEPDNYWTILRKNWKYFLALQIKWKNNIFYKK |
| | | KWSWVIDIEEAYKIDLWDEFYEKMDYKFLPDPKKMLPKVIFAKSNV |
| | | KLFNPSKEILQIKENETFKTWDKFKVNDFYKIVDFYKENIIKYPDWKIF |
| | | NFKFSDTKTYNNLSDFYKEIELWSYDLNFRKVSKKYILKSIEEKNIYLFEI |
| | | YNKDFADWKTWSENLHTMYFKWLFEENNLNNIVLKLNWQAEIFR |
| | | REASLKEKEVNRAKENKEKSHNIIENARYTKDKLFFHCPIKLNFAKHN |
| | | EKINQEILKYISDNKEINIIWIDRWEKHLAYYSVINRDWNIIKDKNWN |
| | | LVKWSLNIVWNNQNYHDKLETREKERQDARWSWKTIWNIKDLKQ |
| | | GYISQVVHKLAELVIEHNAIIVFEDLNSWFKRWRQKIERQVYQKLEK |
| | | ALIEKLNYLTFKDKNFWENWHYLKAYQLTAPFETFEKVWKQTWVIF |
| | | YTDPSYTSSTCPACWFRKDLYLKYSNLKNALWDIEKIDSIIFDWKRFIF |
| | | EYNNKKVFTDRDRKRNISSEESWIKWWKTIDNNITEFLEILFKKSNID |
| | | YTSWNNLILDIQEINEKELYKWVFDNFNAILNIRNSTIKDNSRTWDFI |
| | | CCPACDFDSRKENKIWIENWDDNWAFNIARKWIIILNKIDSYLNEK |
| | | WSLDKILWWDMIVKQIDWDDFTHKK |
| 166 | Cas12 | MATAINYPTTQRAYTLRLRGIDPQDQSWRDALWATHEAVNRGAK |
| | | VFGEWLLTLRGGLDHQLADAPVKVRGGTTRLPSDEERRDRRVLLAL |
| | | SWLSVEDAHGAPPDASLIVAKGTDSADCRARKLADALIAILQARSVA |
| | | ASEIGDPSKPPEDQPGTWLGDCMGSLSAAIRDDAVWVNRSKAFDA |
| | | ATQSCPSLTRDEIWDFLEPFFASPDAYLKPERAESDEGDSTSAATEDK |
| | | AKDLVQKAGGWLSKRMGAGGGANFQDLARAYQAIAQWASSAQP |
| | | GQSAQQAVGSLAGYLSQHGFSPTANDATGVLAVISGPGYKSATRN |
| | | HITAIATSPEITPQDLSKLQELATKDKAGCSSKIGGKGPRPYATMILO |
| | | QVEAACGFTYLQSDGPARHREFSVMLDHAARRVNVAHSWIKNAE |
| | | AERRQFESDARRIKKVPQDALNWLRGYCEERGGASGSLEGYRIRRR |
| | | AIDGWDQVVIRWSRSDCQSADDRIAAARQLQDDPEIDKFGDIQLFE |
| | | ALAAEEALCVWKPDGNPTAQPLKDFVAATEADAKKKRFKVPAYRH |
| | | PDPLRHPVFTDFGNSRWGIEYSAHRAPAKCDELGQQVDRLTOAVA |
| | | EAQRNLDGATAAQRASRESKLAEAQSKLVAAQTEFAAINDPHRVEL |
| | | KLWNGQAVAAIPMRWSSKRLIADLSLRRATQPSSDQRIGVTRADRL |
| | | GRAAGNADDGRPVTITGLFQQDHWNGRLQAPRAQLDAIAKHVDK |
| | | HGWDAKARRQIARIRWVVSFSAELSQQGPWFEFCHRFGEDAPAR |
| | | PFVSRHGEYAVKHRDNDQRKGHAKLILSRLPGLRVLAVDLGHRYAA |
| | | ACAVWEAISSDQMRQACAAANAPAPHPLAMYIHLKSTTAKGKPTT |
| | | TIYRRIGPDKLPDGTPHPAPWARLDRQFLIKLPGEDRPARAASPDEIK |
| | | AVEDFEDSVGRVRTAVDPPRKRGVDLLMHDAVRTARLALARHGRR |
| | | ARIAFQLISQVRILPGGRPQTLDDAGRRDLLNDTLADWYALATDSR |
| | | WTDAAARQLWNERLAALNGGFTIDPPADASQPEAERTRAQRRQA |
| | | EQELRHRLASLVEALFCNPTLCQQLHQAWTDRWNADDQQWRSRL |
| | | KWLSRWLLPRGGSRRDGSRRHVGGLSLTRISTLIDFRRKVQVGYFTR |
| | | LRPDGSRAEIGPQFGQSTLDAIQRLKDQRIKQLTSRIVEAALGIGVEQ |
| | | DRIWDAAKRKWRTVKRPREPRYHVDDQGVQQRDPRFQACHAVVI |
| | | EDLSHYRPEETRTRRENRATMDWKSAETRKRLADHCQLYGLHLRD |
| | | VNPQYTSRQDSRTGAPGCRCVDVSVADFLTKPAWRKQVAQARGK |
| | | VASNRGDARDRLLVELDHQLTTANSLRGEMDSLRIPVNGGEVFVSA |
| | | DPRSPLAAGIQADLNAAANIGLRALMDPDFLGTWWYVPCDPSTKK |
| | | PHIEKVKGSILATVGALQATSEEAAAPPRRGRGGTRSAAPREVINLW |
| | | RDPSAVRIQDATAGEVWDVTPVYWSIVKDRVVDVLRQRNTKSGD |
| 167 | Cas12 | MAVRSVKLKLLVPRDGSAESVRKRKALWATHQFVNDAAAAYAELLL |
| | | EMRQEDVCRGTDDHGKDVIEPAAHWQAKLRARLAAKQLPPVAVA |
| | | EALPLLKAFYGSRLIKSFVANDKGVAGTGNATDLNTWLSGLVDPASV |
| | | AGEKTELRKQLLAELPLCEAADADFEGAARKMLAKSDAREALLEGP |
| | | GTGVGWPAAYNANPTDSVWLDMLHKAAAKARLELADTTVSELKK |
| | | LGVFPLLQAASSNRVFGSGVLNPFERMAAAQAAAALLPWETKRHE |
| | | MRKRRDKFADQLNQWDTEFGASHATALAAIRAFEAEESERARRESL |
| | | GNEGTGYRIGGRELRDAWTLLRDWLKGHSTATAAAREDKVRELQA |
| | | KQGRSFGSHRLLSWLAKPAQQWLADHSAGDVVTRIAVRNARQRK |
| | | LDTARTLPIWTGADAVKHPRFANFDPPNNTNQPGFDLRAGTQKGR |
| | | LTLRLSLLTERADGLLLAQDHDFQLVPSRQMAEIVLHKDGKERALSW |
| | | QSQDGIGRQVGDVGGSALLFSRDHAECLLERKQITRLERGAWPAAL |
| | | PVWFKLSLDIGAEHKALLKQRFKWGVWLNSALVTRNAKDAKGVPP |
| | | PVGTRVLAVDLGLRSAATVSVWQVVDAATPVVAGKWRVPLSDTLS |
| | | AVHERSAMLALPGEHVDAGVLAARRAANEKLAGLLAATSHLSTVFK |
| | | LGRAEQGDRRRELLERLGEGDDRRARAAVATTAAERDGLRAVLGA |
| | | TQDAWAGAVAAVWRRLETDLAGAIAAYRKQQREDVQLRREARHG |
| | | PGASQLPKQAAAERLLGGKSAWQIEYKERVRKLLTRWIMRQRPGD |
| | | TAVRRLARKDLGKYCGGLLDHLTALKEDRAKTTADLIVQAARGRVR |
| | | AHKDAHGRQQDRELWLAKYAPCDLIVMEDLGRYRFATDRPPSENR |
| | | QLMQWTHREVFRLVQMQAEVEGIQVLETGAEFSSKFDARTWAPG |
| | | VRCEPITKLWVERYRNGEMPWLADKADEWRREGIELAQLVPGQLL |
| | | PTGSGEQFVAVSATGGLRVRHADLNAAQCIALRALTGHGTAFRLTA |
| | | RRLGDVFVSAKGLGKRPQGALWREFGSALPPAVVVLRPAGEVRYAL |
| | | RPFASARDAAAALGLQLGALRNVDATDAESDAEDGDLAELLAGAD |
| | | PDRATFFRDPSGDVHGGAWVQAKVFWAEVRRHVRLGLQAQGLLP |
| | | AAARSSEPRQMQLPLAGALPGDDIPL |
| 168 | Cas12 | MAAFQRSYTMNLKPATSEQDKFILWNRLFLTHWSVNEGAKIFGELF |
| | | LNLRGGLSPELGIFDLNKDKDDRKKKALVMGRRRLLALGWLSVEDN |
| | | LSAGDHPFRIREIPVGRNMEIKQATTLLTEILKNKGVKDEAVIKEWID |
| | | DCTPSLIANIREDAVWINRAKSFYSMNPCPTKDEVWKILSYVLNTSFL |
| | | DLSLNDSSERDNTKNKKGTKENEKDVSNKSKELYGWLFTKNPNKM |
| | | REAGENKDKFINNFRENFNTFTDYANLKVEIELWRKNNISNTLLITQK |
| | | AKYPPEVKEANHPSKFSVGYRKLLVHLELWPSSKDENGDIPKGIEGK |
| | | DKSHNQILLDYLLEVCNEGNKTTKKVIVPAWADGIKTELESKASIKVG |
| | | DSTSSVLQRLM1KMAARRISQTLSWIKINEQVRHDAYQKKNKAFKLL |
| | | CEIDKNGEACKWLENYELFRRDDSGGEEYHISARAISCWKQILEEW |
| | | QKNDSSKALREKVKVVQAAEDKFGDARLFEDLADDNARSVWLLPD |
| | | GNKTPDILNWWCEYRTADIDESRFKIPCYCHPHPFKHPVYVEYGKS |
| | | NPQVIFSLKHDKARKNRIDNGWNPKNPRILALLLLDIVRQKSTLAPF |
| | | VWESKRLWKDLGGDATVTYKIPRSDRMGLSSIGNIDYARPEVPFLKE |
| | | KWNARLQSDRRTLEKLEKYWNPESMKWIDDGKFLIQSKWFITFGP |
| | | DMETAEGPWKLYLKENINDNNYLGNRSKENQKRGYRAKKLLSGYP |
| | | AGMRILSVDLGHRYAASCAIWETITKKQITEELAYQPDKNSVFEHSC |
| | | KTIDKKIKNTVYRRIGDDSIDAPWAKLEKQFTIKLQGEDKSCYLLRSDE |
| | | KELFRSILSKLSCLNNDTGHNILEMIENLLRIVKAKIYRQGILARISYSM |
| | | TAQYKPGKGGQKSPLSDEDKIHYLSENLAAWSALMGNQEWNEDGI |
| | | SDWYKKYISHLVSGPKPKEGNRKSDRDKIIEYFLPAARKLYDDNETRI |
| | | NIHDLFKELWDENNKQLSAVLKEIKKIILPKGIRYFDKNNDSSSRWKN |
| | | NQSKLKQITHRGGLSLRRIVAIEGYYKLAKAYKNHPEPDNLTKNIPLP |
| | | GDNSSAGFNQRIRDTLERMKEQRVKQIASRIVESALGLGIEGYKKRP |
| | | LTPESKPCQAIVIEDLSHYRPDELQTRRENRRLMQWSSSKVKKYLSE |
| | | ACEMHDVLLVEISPEYTSRQDSRTGVAGLRCIDINIREFLKDSSSWQ |
| | | NKIKTIQMKPTNKKSNLDQYLIELNESLGERYKDKVIPSDKFVRIPRKG |
| | | GDIFVSSSKESPVSKGIQADLNAAANIGLKALLDPDWAGAWWYILIE |
| | | AKSNHVIPYGKKYKGAECLRDFKFSGLENQVMKNNMNLWRDLOS |
| | | QFSSEDKWMSYKEYNELTEKRVINILRERAGLELIEE |
| '169 | Cas12 | MPTRTINLKMVLGRKDDTAELRRALWTTHEHVNLAVAEVERVLLRC |
| | | RGRSYWTLDRRGDPVHVPESQVAEDALAMAREAQRRNGWPVVG |
| | | EDEEILLALRYLYEQIVPSCLLDDLGKPLKGDAQKIGTNYAGPLFDSDT |
| | | CRRDEGKDVACCGPFHEVAGKYLGALPEWATPISKQEFDGKDASHL |
| | | RFKATGGDDAFFRVSIEKANAWYEDPANQDALKNKAYNKDDWKK |
| | | EKDKGISSWAVKYIQKQLQLGQDPRTEVRRKLWLELGLLPLFIPVFD |
| | | KTMVGNLWNRLAVRLALAHLLSWESWNHRAVQDQALARAKRDE |
| | | LAALFLGMEDGFAGLREYELRRNESIKQHAFEPVDRPYVVSGRALRS |
| | | WTRVREEWLRHGDTQESRKNICNRLQDRLRGKFGDPDVFHWLAE |
| | | DGQEALWKERDCVTSFSLLNDADGLLEKRKGYALMTFADARLHPR |
| | | WAMYEAPGGSNLRTYQIRKTENGLWADVVLLSPRNESAAVEEKTF |
| | | NVRLAPSGQLSNVSFDQIQKGSKMVGRCRYQSANQQFEGLLGGAE |
| | | ILFDRKRIANEQHGATDLASKPGHVWFKLTLDVRPQAPQGWLDGK |
| | | GRPALPPEAKHFKTALSNKSKFADQVRPGLRVLSVDLGVRSFAACSV |
| | | FELVRGGPDQGTYFPAADGRTVDDPEKLWAKHERSFKITLPGENPS |
| | | RKEEIARRAAMEELRSLNGDIRRLKAILRLSVLQEDDPRTEHLRLFME |
| | | AIVDDPAKSALNAELFKGFGDDRFRSTPDLWKQHCHFFHDKAEKVV |
| | | AERFSRWRTETRPKSSSWQDWRERRGYAGGKSYWAVTYLEAVRG |
| | | LILRWNMRGRTYGEVNRQDKKQFGTVASALLHHINQLKEDRIKTGA |
| | | DMIIQAARGFVPRKNGAGWVQVHEPCRLILFEDLARYRFRTDRSRR |
| | | ENSRLMRWSHREIVNEVGMQGELYGLHVDTTEAGFSSRYLASSGA |
| | | PGVRCRHLVEEDFHDGLPGMHLVGELDWLLPKDKDRTANEARRLL |
| | | GGMVRPGMLVPWDGGELFATLNAASQLHVIHADINAAQNLQRRF |
| | | WGRCGEAIRIVCNQLSVDGSTRYEMAKAPKARLLGALQQLKNGDA |
| | | PFHLTSIPNSQKPENSYVMTPTNAGKKYRAGPGEKSSGEEDELALDI |
| | | VEQAEELAQGRKTFFRDPSGVFFAPDRWLPSEIYWSRIRRRIWQVT |
| | | LERNSSGRQERAEMDEMPY |
| 170 | Cas12 | MVTRALNLKLVVPRRPGELTKAEALWSTHDIVNRATSYYESQLLLCR |
| | | QQDYQTRELTVSAGDQAPDLDALIANARDRNRYRGLEKPQVVREK |
| | | LRNLYEAIVPPAIGKTGTAQAVGAFVSPLLDADSRGFTEIFDKIEALPN |
| | | WVDGVRAEEPDALEAAADWLKSPQGKERLRPTGAPPTWIKLAKKK |
| | | DAGWAAAFVADIDKKLKEVEGTPTLMQELRALGVMPLFPSFFASRI |
| | | AGHKGAVSTWDRLALRLAVAHLLSWESWVELAAKEHAARVAKLEK |
| | | FRDDNILGEIADAVEALRLYEKERTEELQQKAQLDAEEVRTTSRTIRG |
| | | WVDLREKWLKTDASPDALISLVAAEQKRKSGKFGDPQLFRWLAKPE |
| | | NHFVWNKPDFDPPSLFASLRMIEGLVERSKETAWMTLPDARLHPR |
| | | SSQWEPHGGGNLKTFRLEQGEGGSLSVTLPLLRKSGDDSYVEEEHA |
| | | FSLAGSKQIPNASLDVRRNKYCLSYRTPTGEEAEAVVGSADLLLDWY |
| | | FLQQRSEHRPEEGDIGPAFLKLALDITPIDPVWGEREKTPAIHHFKTA |
| | | SGKNTRHADGVAPGFRMLAVDLGIRTLATCSVFELKATAPAGRLSFP |
| | | IAHLDLHAVHERSFTLTLDGEDPDRDAERWRENKSAELRRLRMGLT |
| | | RYRNIRNMREDAPDEREVLLEDLQEKVQEHGWAFEEPLLRELAKHK |
| | | DTPEPIWEAELTKALAQFRSDFGVIVGEWRRSNRARSTDSHAGKSM |
| | | WAIDHLTNSRRFLMSWSLLSKPGQIRRLDRDKQGVFAKHLLDHLEG |
| | | LKADRLKTGSDLIVQAARGFRRDKRGNWHKAYKPCHGILFEDLSRY |
| | | RMRTDRPRRENSQLMKWAHRAVPKEVGMQAEVYGIRVEDTGAA |
| | | FSSRFHAASHTPGIRMHPICQKDLENEWLLDEIEKQNSGVKRRELKL |
| | | GQLVQLNGGELFACVTASGVKTLHADINAAQNLQRRFFTRHGDAF |
| | | RIVARKVLVDEEEVWVPRSLGKRLLGALGSHGKLVPTGHESGSCRFE |
| | | EITTRAWSKLSGEKLSDDRVGNEEDQIIASIEEEALERTGEVVVFFRD |
| | | PSGQVLPRDLWYPSKTFWSIVKSTTLSKLKAAP |
| 171 | Cas12 | MEDKQFLERYKEFIGLNSLSKTLRNSLIPVGSTLKHIQEYGILEEDSLRA |
| | | QKREELKGIMDDYYRNYIEMHLRDVHDIDWNELFEALTEVKKNQT |
| | | DDAKKCLEKIQEKKRKEIYQYLSDDAVFSEMFKEKMISGILPDFIRCN |
| | | EEYSEEEKEEKLKTVALFHRFTSSFNDFFLNRKNVFTKEAIATAIGYRV |
| | | VHENAEIFLENMVAFQNIQKSAESQISIIERKNEHYFMEWKLSHIFTA |
| | | DYYMMLMTQKAIEHYNEMCGVVNQHMKEYCQKEKKNWNLYRM |
| | | KRLHKQILSNASTSFKIPEKYENDAEVYESVNSFLQNVMEKTVMERI |
| | | AVLKNNTDNFDLSKIYITAPYYEKISNYLCGSWNTIADCLTHYYEQQI |
| | | AGKGARKDQKVKAAVKADKWKSLSEIEQLLKEYARAEEVKRKPEEYI |
| | | AEIENIVSLKEVHLLEYHPEVNLIENEKYATEIKDVLDNYMELFHWMK |
| | | WFYIEEAVEKEVNFYGELDDLYEEIRDIVPLYNKVRNYVTQKPYSDTK |
| | | IKLNFGTPTLANGWSKSKEYDYNAILLQKDGKYYMGIFNPVQKPEKE |
| | | IIEGHSHPLEGNEYKKMVYYYLPSANKMLPKVLLSKKGMEIYQPSEYI |
| | | INGYKERRHIKSEEKFDLQFCHDLIDYFKSGIERNPDWKVFGFHFSDT |
| | | DTYQDISGFYREVEDQGYKIDWTYIKEADIDRLNEEGKLYLFQIYNKD |
| | | FSEKSTGRENLHTMYLKNLFSEENIREQVLKLNGEAEIFFRKSSVKKPII |
| | | HKKGTMLVNRTYMEEMHGESVKKNIPEKEYQEIYNYMNHRWKGE |
| | | LSAEAKEYLKKAVCHETKKDIVKDYRYSVDKFFIHLPITINYRASGKEA |
| | | LNSVAQRYIAHQNDMHVIGIDRGERNLIYVSVINMQGEIIEQKSFNV |
| | | VNKYNYKEKLKEREQNRDEARKNWKEIGQIKDLKEGYLSGVIHEIAK |
| | | MMIKYHAIVAMEDLNYGFKRGRFKVERQVYQKFENMLIQKLNYLV |
| | | FKDRSADEDGGVLRGYQLAYIPDSVKKLGRQCGMIFYVPAAFTSKID |
| | | PATGFVDIFNHKAYTTDQAKREFILSFDEICYDVERQLFRFTFDYANF |
| | | ATHNVTLARNNWTIYTNGTRTQKEFVNRRVRDKKEVFDPTEKMLK |
| | | LLELEGVEYQSGANLLPKLEKISDPHLFHELQRIVRFTVQLRNSKNEE |
| | | NDVDYDHVISPVLNEEGKFFDSSKYENKEEKKESLLPVDADANGAYC |
| | | IALKGLYIMQAIQKNWSEEKALSPDVLRLNNNDWFDYIQNKRYR |
| 172 | Cas12 | MAQASSTPAVSPRPRPRYREERTLVRKLLPRPGQSKQEFRENVKKLR |
| | | KAFLQFNADVSGVCQWAIQFRPRYGKPAEPTETFWKFFLEPETSLP |
| | | PNDSRSPEFRRLQAFEAAAGINGAAALDDPAFTNELRDSILAVASRP |
| | | KTKEAQRLFSRLKDYQPAHRMILAKVAAEWIESRYRRAHQNWERN |
| | | YEEWKKEKQEWEQNHPELTPEIREAFNQIFQQLEVKEKRVRICPAA |
| | | RLLQNKDNCQYAGKNKHSVLCNQFNEFKKNHLQGKAIKFFYKDAEK |
| | | YLRCGLQSLKPNVQGPFREDWNKYLRYMNLKEETLRGKNGGRLPH |
| | | CKNLGQECEFNPHTALCKQYQQQLSSRPDLVQHDELYRKWRREYW |
| | | REPRKPVFRYPSVKRHSIAKIFGENYFQADFKNSVVGLRLDSMPAGQ |
| | | YLEFAFAPWPRNYRPQPGETEISSVHLHFVGTRPRIGFRFRVPHKRS |
| | | RFDCTQEELDELRSRTFPRKAQDQKFLEAARKRLLETFPGNAEQELR |
| | | LLAVDLGTDSARAAFFIGKTFQQAFPLKIVKIEKLYEQWPNOKQAGD |
| | | RRDASSKQPRPGLSRDHVGRHLQKMRAQASEIAQKRQELTGTPAP |
| | | ElIIDQAAKKATLQPFDLRGLTVHTARMIRDWARLNARQIIQLAEE |
| | | NQVDLIVLESLRGFRPPGYENLDQEKKRRVAFFAHGRIRRKVTEKAV |
| | | ERGMRVVTVPYLASSKVCAECRKKQKDNKQWEKNKKRGLFKCEGC |
| | | GSQAQVDENAARVLGRVFWGEIELPTAIP |
| 173 | Cas12 | MAVKSIKVKLRLSECPDILAGMWQLHRATNAGVRYYTEWVSLMR |
| | | QEILYSRGPDGGQQCYMTAEDCQRELLRRLRNRQLHNGRQDQPG |
| | | TDADLLAISRRLYEILVLQSIGKRGDAQQIASSFLSPLVDPNSKGGRGE |
| | | AKSGRKPAWQKMRDQGDPRWVAAREKYEQRKAVDPSKEILNSLD |
| | | ALGLRPLFAVFTETYRSGVDWKPLGKSQGVRTWDRDMFQQALERL |
| | | MSWESWNRRVGEEYARLFQQKMKFEQEHFAEQSHLVKLARALEA |
| | | DMRAASQGFEAKRGTAHQITRRALRGADRVFEIWKSIPEEALFSOY |
| | | DEVIRQVQAEKRRDFGSHDLFAKLAEPKYQPLWRADETFLTRYALY |
| | | NGVLRDLEKARQFATFTLPDACVNPIWTRFESSQGSNLHKYEFLFDH |
| | | LGPGRHAVRFQRLLVVESEGAKERDSVVVPVAPSGQLDKLVLREEE |
| | | KSSVALHLHDTARPDGFMAEWAGAKLQYERSTLARKARRDKQGM |
| | | RSWRRQPSMLMSAAQMLEDAKQAGDVYLNISVRVKSPSEVRGOR |
| | | RPPYAALFRIDDKQRRVTVNYNKLSAYLEEHPDKQIPGAPGLLSGLR |
| | | VMSVDLGLRTSASISVFRVAKKEEVEALGDGRPPHYYPIHGTDDLVA |
| | | VHERSHLIQMPGETETKQLRKLREERQAVLRPLFAQLALLRLLVRCG |
| | | AADERIRTRSWQRLTKQGREFTKRLTPSWREALELELTRLEAYCGRV |
| | | PDDEWSRIVDRTVIALWRRMGKQVRDWRKQVKSGAKVKVKGYQL |
| | | DVVGGNSLAQIDYLEQQYKFLRRWSFFARASGLVVRADRESHFAVA |
| | | LRQHIENAKRDRLKKLADRILMEALGYVYEASGPREGQWTAQHPPC |
| | | QLIILEELSAYRFSDDRPPSENSKLMAWGHRGILEELVNQAQVHDVL |
| | | VGTVYAAFSSRFDARTGAPGVRCRRVPARFVGATVDDSLPLWLTEF |
| | | LDKHRLDKNLLRPDDVIPTGEGEFLVSPCGEEAARVRQVHADINAA |
| | | QNLQRRLWQNFDITELRLRCDVKMGGEGTVLVPRVNNARAKQLF |
| | | GKKVLVSQDGVTFFERSQTGGKPHSEKQTDLTDKELELIAEADEARA |
| | | KSVVLFRDPSGHIGKGHWIRQREFWSLVKQRIESHTAERIRVRGVGS |
| | | SLD |
| 174 | Cas12 | MSNPNIPNISPNITLTRDDVVNLLMSSIAMEELGLAHIINAEGEKIQF |
| | | ALGTLQGASGPPATLQQVLEVNQSTQAMLDTIFRQEMMLDSKLKT |
| | | ATNIPTLRGPTGPVGPTGAPGGVISINGQTGVVTLDASNGVMPFM |
| | | REQSTSSLDDYKDPGIYXXXXXXXXXXXXXXXXXXXXXXXXXXXXXXX |
| | | XXXXXXXXXXXXXXXXXXXXXXXXXXXXXXXXXXXXXXXXXXXXXXXX |
| | | XXXXXXXXXXXXXXXXXXXXXXXXXXXXXXXXXXXXXXXXXXXXXXXX |
| | | XXXXXXXXXXXXXXXXXXXXXXXXXXXXXXXXXXXXXXXXXXXXXXXX |
| | | XXXXXXXXXXXXXXXXXXXXXXXXXXXXXXXXXXXXXXXXXXXXXXXX |
| | | XXXXXXXXXXXXXXXXXXXXXXXXXXXXXXXXXXXXXXXXXXXXXXXX |
| | | XXXXXXXXXXXXXXXXXXXXXXXXXXXXXXXXXXXXXXXXXXXXXXXX |
| | | XXXXXXXXXXXXXXXXXXXXXXXXXXXXXXXXXXXXXXXXXXXXXXXX |
| | | XXXXXGATGATGATGATGPQEPRALREPRAPQARREPRGLLEPQVL |
| | | RGPQEPRALREPRAPRALREPRALRALRALQELRAPRALRGLQEPRV |
| | | LQGPRERQVRPEPRVLQGPRERQVRQGLQGLLEPRAKRERQVRPE |
| | | PREPQERQAPLVQQALLEPQALLGQAL |
| 175 | Cas12 | MIKKSNFWQFTGLYELSKTLRFELKPVWETLNILEKDWVSQKDKEVE |
| | | ENYNKIKVFFDSLHREFVKQSLENWYLELLENFYNSYIELNKNIENKK |
| | | NKSLQKLFEKSSKELKKELVSFFEWKWNDWKQKYSFLKKWWIDVL |
| | | NEKEVLDLMWEFYPKEKELFKKFDKFFTYFSNFKESRKNFYADDWR |
| | | AWAIATRVIDENLITFIKNIEDFKKFKNNFSDFIENGFSDWKIKINWFT |
| | | LEEKQVFDLDFYNNCLLQDWIDNYNKILWWFSEENWNKIQWINEK |
| | | INLFKQNQNKTNSKDVKFPRFKLLYKQILSEKEKLIFVDEIENDEKLINF |
| | | IKESKNNNLIKVEKAIEITENFIKNNETFELDKIYLSKISINTISNKFFSSW |
| | | DYILKEGFDKWEIKEFISFEDLKNAFGKIKYENLEDIFKSNYITDYIAIN |
| | | WEDLYKNFLNIFLYEFKQNINEINFYNSELEKLFLEKFEKTETQVQIIKN |
| | | YFDSVLSLYKMTKYFALEKGKKKIEDLETDNNFYNDFFVYYEDFEIWK |
| | | DYNLVRNFITKKQVKTDKFKLNFENSQFLTGWDKDKEKERLWIILKK |
| | | DEKYYLWILKNNKIFNSYNYESWDFYEKMSYKQLNNVYRQLPRFAF |
| | | SKAKREVYWITPELEQIKEEFDIFQKNKEKWEKFDIEKLKKLINCYKK |
| | | WFIKTYENEFDLEKIKNTDYLDLATFYDEIEQKTYKIDFNKISENFINAK |
| | | VNSWELYLFQIYNKDFSETKKAWSKENIHTKYFKLLFDEKNLEKLVIKL |
| | | SWWAEMFFREKTEKLKTKLDKSWKEVLEHRRYSKDKIMLHLSITLN |
| | | ANKWDSFWFNKMVNEYLNKNEDIKIIWIDRGEKHLAYYSVIDKNW |
| | | KIEEIDTLNIIKSSDWKITNYLEKLEKIESSRKDSRVSWWEIENIKELKN |
| | | GYISQVVNKLAELIIKYNAIIVFEDLNIWFKRWRQKIEKQIYQKLELAL |
| | | AKKLNYLTQKDKNDNEVLWNLKALQLVPKVNDYQDIANYKQSGIM |
| | | FYTRANYTSTTCPCCWFRKNIYISNSDTKEKQKKDFEKIDIKFDGEKFI |
| | | FSYEIIQDKKAKQKSNKTNFSVNSNFSRFKYNSKKMLVEEVNLNLEL |
| | | QNLFKDIDLKWDINKQILEKDSYFYKSLTYYFNLILQLRNSDSKNDIDY |
| | | ITCPSCNYHSKDWFQGLEYNADANWAYNIARKWIIMLDRIEKNFEK |
| | | PDLYVSDIDWDNFTQK |
| 176 | Cas12 | MIKKSNFWQFTGLYELSKTLRFELKPVWETLNILEKDWVSQKDKEVE |
| | | ENYNKIKVFFDSLHREFVKQSLENWYLELLENFYNSYIELNKNIENKK |
| | | NKSLQKLFEKSSKELKKELVSFFEWKWNDWKQKYSFLKKWWIDVL |
| | | NEKEVLDLMWEFYPKEKELFKKFDKFFTYFSNFKESRKNFYADDWR |
| | | AWAIATRVIDENLITFIKNIEDFKKFKNNFSDFIENGFSDWKIKINWFT |
| | | LEEKQVFDLDFYNNCLLQDWIDNYNKILWWFSEENWNKIQWINEK |
| | | INLFKQNQNKTNSKDVKFPRFKLLYKQILSEKEKLIFVDEIENDEKLINF |
| | | IKESKNNNLIKVEKAIEITENFIKNNETFELDKIYLSKISINTISNKFFSSW |
| | | DYILKEGFDKWEIKEFISFEDLKNAFGKIKYENLEDIFKSNYITDYIAIN |
| | | WEDLYKNFLNIFLYEFKQNINEINFYNSELEKLFLEKFEKTETQVQIIKN |
| | | YFDSVLSLYKMTKYFALEKGKKKIEDLETDNNFYNDFFVYYEDFEIWK |
| | | DYNLVRNFITKKQVKTDKFKLNFENSQFLTGWDKDKEKERLWIILKK |
| | | DEKYYLWILKNNKIFNSYNYESWDFYEKMSYKQLNNVYRQLPRFAF |
| | | SKAKREVYWITPELEQIKEEFDIFQKNKEKWEKFDIEKLKKLINCYKK |
| | | WFIKTYENEFDLEKIKNTDYLDLATFYDEIEQKTYKIDFNKISENFINAK |
| | | VNSWELYLFQIYNKDFSETKKAWSKENIHTKYFKLLFDEKNLEKLVIKL |
| | | SWWAEMFFREKTEKLKTKLDKSWKEVLEHRRYSKDKIMLHLSITLN |
| | | ANKWDSFWFNKMVNEYLNKNEDIKIIWIDRGEKHLAYYSVIDKNW |
| | | KIEEIDTLNIIKSSDWKITNYLEKLEKIESSRKDSRVSWWEIENIKELKN |
| | | GYISQVVNKLAELIIKYNAIIVFEDLNIWFKRWRQKIEKQIYQKLELAL |
| | | AKKLNYLTQKDKNDNEVLWNLKALQLVPKVNDYQDIANYKQSGIM |
| | | FYTRANYTSTTCPCCWFRKNIYISNSDTKEKQKKDFEKIDIKFDGEKFI |
| | | FSYEIIQDKKAKQKSNKTNFSVNSNFSRFKYNSKKMLVEEVNLNLEL |
| | | QNLFKDIDLKWDINKQILEKDSYFYKSLTYYFNLILQLRNSDSKNDIDY |
| | | ITCPSCNYHSKDWFQGLEYNADANWAYNIARKWIIMLDRIEKNFEK |
| | | PDLYVSDIDWDNFTQK |
| 177 | Cas12 | MATRSFILKIEPNEEVKKGLWKTHEVLNHGIAYYMNILKLIRQEAIYE |
| | | HHEQDPKNPKKVSKAEIQAELWDFVLKMQKCNSFTHEVDKDVVFN |
| | | ILRELYEELVPSSVEKKGEANQLSNKFLYPLVDPNSQSGKGTASSGRK |
| | | PRWYNLKIAGDPSWEEEKKKWEEDKKKDPLAKILGKLAEYGLIPLFIP |
| | | FTDSNEPIVKEIKWMEKSRNQSVRRLDKDMFIQALERFLSWESWNL |
| | | KVKEEYEKVEKEHKTLEERIKEDIQAFKSLEQYEKERQEQLLRDTLNT |
| | | NEYRLSKRGLRGWREIIQKWLKMDENEPSEKYLEVFKDYQRKHPRE |
| | | AGDYSVYEFLSKKENHFIWRNHPEYPYLYATFCEIDKKKKDAKQQAT |
| | | FTLADPINHPLWVRFEERSGSNLNKYRILTEQLHTEKLKKKLTVQLDR |
| | | LIYPTESGGWEEKGKVDIVLLPSRQFYNQIFLDIEEKGKHAFTYKDESI |
| | | KFPLKGTLGGARVQFDRDHLRRYPHKVESGNVGRIYFNMTVNIEPT |
| | | ESPVSKSLKIHRDDFPKFVNFKPKELTEWIKDSKGKKLKSGIESLEIGLR |
| | | VMSIDLGQRQAAAASIFEVVDQKPDIEGKLFFPIKGTELYAVHRASE |
| | | NIKLPGETLVKSREVLRKAREDNLKLMNQKLNFLRNVLHFQQFEDIT |
| | | EREKRVTKWISRQENSDVPLVYQDELIQIRELMYKPYKDWVAFLKQL |
| | | HKRLEVEIGKEVKHWRKSLSDGRKGLYGISLKNIDEIDRTRKFLLRWS |
| | | LRPTEPGEVRRLEPGQRFAIDQLNHLNALKEDRLKKMANTIIMHAL |
| | | GYCYDVRKKKWQAKNPACQIILFEDLSNYNPYEERSRFENSKLMKW |
| | | SRREIPRQVALQGEIYGLQVGEVGAQFSSRFHAKTGSPGIRCSVVTK |
| | | EKLQDNRFFKNLQREGRLTLDKIAVLKEGDLYPDKGGEKFISLSKDRK |
| | | LVTTHADINAAQNLQKRFWTRTHGFYKVYCKAYQVDGQTVYIPESK |
| | | DQKQKIIEEFGEGYFILKDGVYEWGNAGKLKIKKGSSKQSSSELVDSD |
| | | ILKDSFDLASELKGEKLMLYRDPSGNVFPSDKWMAAGVFFGKLERIL |
| | | ISKLTNQYSISTIEDDSSKQSM |
| 178 | Cas12 | MAESMYNQQNINQKSTETPTEEDALGIKNPLLTPTTLGQNFLSLQSI |
| | | SPLGSRSINLINWSLISPNQTLLQNFQDNENWQDSSISEFRPFSKNSL |
| | | TENSPIIEPQSDKTLPSSVPIQLSSELPIQQPPETSFIDSESPIPQPPETP |
| | | SSDSESPIGQTENIFPFQIDQKTRRNSVIQNSKSSISHFFQKKSEFPRE |
| | | KISQENVNKLTKKSAENQDISTTEESVINSIETNDLQTINPTDIPNPEIP |
| | | VSTLQKQPDSTIDNIPQTESVSTINPTDIPXXXXXXXXXXXXXXXXXXX |
| | | XXXXXXXXXXXXXXXXXXXXXXXXXXXXXXXXXXXXXXXXXXXXXXXX |
| | | XXXXXXXXXXXXXXXXXXXXXXXXXXXXXXXXXXXXXXXXXXXXXXXX |
| | | XXXXXXXXXXXXXXXXXXXXXXXXXXXXXXXXXXXXXXXXXXXXXXXX |
| | | XXXXXXXXXXXXXXXXXXXXXXXXXXXXXXXXXXXXXXXXXXXXXXXX |
| | | XXXXXXXXXXXXXXXXXXXXXXXXXXXXXXXXXXXXXXXXXXXXXXXX |
| | | xXXXXxxxxxxxxxxXXXXXXXXXXXXXXXSKNNRIPQLITFLKLNQY |
| | | QQLILQIFLTQKFSFQLSKNNRIPPLITFLKLNQYQQLIPRVLLHQKFLF |
| | | QLFKNNRIPPLITFPKLNQYQQLIPRIFLTQKFPFQISRNNRIPQLITFP |
| | | KLNOYQ |
| 179 | Cas13 | MGAIKNKHIFAAYANLAIDGLIKTLNFIAKKLDTQKQLSSWDIKHVIT |
| | | LIDSIFDQNPQNNLEQVVEGYLPWIKPIIEMKTPKKGERQSDKLCIEY |
| | | KTIITAFASLLNDVRNYYTHYYHDPICIYPGGYDIPSSLNCIYDSAINIIK |
| | | ERFQAEEKEMEHLRRYTRKKGRVVLKTEDDHFYYTLANNNDLSEKG |
| | | YAFFISMFLERKYSYLFLKKLSGFKRGDSLQYRLTLEVFTALSTKPPVER |
| | | LRTTKDTKQDRALDILNELSKIPIELYQTLEPKYREMYNETLQPTDAE |
| | | DPYGLPDRSRIRFRSRFEAFALHFLDKQADFKEIGFYTYLGNYFHNGY |
| | | QKTRVDRETKDRYINFQLAGFCKNIQDISAKKLSEALNVKSIDISTDSI |
| | | PDINSFEPYLVQSTPHYIVNGNNIGIKVLPEGKDTYPTIDEKGAKMPI |
| | | ADFWLSKYELPAMLFYTYLRNNNIHKSHCPLSVKDIIERSIHKSTKOK |
| | | HPEERSELMLRRVMKAIFWTDSKLNEVERIKSQKSAFGKRQHEILKA |
| | | GRIAETLVRDMLWLQPSKNNGRDKVTEPNFQAIQVSLAYFGIRRND |
| | | LTEIFTRAGLINSSNPHPFLAQIGTNYTSLIEFYIAYLKERKVYFSRIOKK |
| | | ILQGKLNIQCHPLRDLQREPNKPQDKEEAIFLPRGLFNEAIINCLKKSK |
| | | LKQLIESPTREKSPALNVSYLIQNYFRTYFEDQSQEFYAQPRNYRLFD |
| | | KLSPNKGKSKSYLSLEQRIKKMEELRPSKIPVAEANKLLEKEDRLYRKN |
| | | YNEICDNESIIRLYOIQDILLFMMTKEYLPSDLYNRINKYKLENVKGIL |
| | | NERVSYLIDLNPLKIQGEDIKIKDYGKLFYIHHDTRISSLNKVLSKVKRN |
| | | NSISSSVKIQPYENYKRECLDFEEAQIQIIPIIHSFEIAMVSMFPDLKKA |
| | | TPGNYYDFNELITEYEKRTKQKIGSSFLIKTRNMFLHDKYEAECIKEIS |
| | | DDFVYAKKIIAEFKMKIENIKLEDLSNDSSA |
| 180 | Cas13 | MARDNFLNTIKLLADKMKLGAISGFGKDGNEVNDINKLFGDKNTYA |
| | | NIENVVEFYFPWIKALEGRFSLDKGDRNLNDMKMFYKSVLTAFFTA |
| | | VDSLRNKYTHYSHKDLNIREIKIECTLGGKDYCIGLLNALDCIYDSAVN |
| | | LLKLRFMVGEDEVAHLRRCKAVNKKVVVRTEKDGFYYRLSDNGGVT |
| | | EKGVIFIASMFLNRKYGFLFLKQLEGFKRSDEKRYRLTLEAFLAFSNIK |
| | | PVDRLKSDKLDRASLGLDMLNELTKIPKELSETLSVDCLYKYLASDGE |
| | | DDLRSRIRYQDRFVPLALEFISQSDEFKDFRFYTYVGNYVYKGYIKRLI |
| | | DGTDKERYLSDRLCGFYKSVNDASSDAIAQKYGVEIKDSNEPDYMLP |
| | | DSFRPHVLRATPHFVINNNNIGIKICGNDCLPIVNGKGVESPEPDYW |
| | | LSIYELPAMLFYAYLREKNGKRFKDYKSIRELIEGVEKKADEKNDRDK |
| | | GALMARHIDKEIIWTQTKLDEVKRLEEKKVAAYGKKGRVVLKSGRM |
| | | ADLLAHDMVRLQPATKGSDKITGVNFQALQVSLAYFKRDILADVFS |
| | | RAMLTTGNHRHPFLYRIDVSHCSSLRDFYVAYLGERRKYFEDVAKKI |
| | | AKNKLNTPCHILRRLQREGSGEEAGKDVKPKFLPRGIFTDSIKNCLEQ |
| | | SKLNIYIRNARNDVKPAINAAYLILMYYKEIEKGEFQGFYGEKRRYDIL |
| | | EEGKPLDLAERKKALASIKPAKIDVSEANMPMSKEEHLMRKRYHAV |
| | | CNNESAIRMYQVQDILLLLMAKDIFKKALSEGVMSKKIGLENLNGIF |
| | | DAPVNFVKNFDNIKLTATGIKIKNYGKVCRLGTDFKFNSLIKAFHKVY |
| | | SKSVEMDYSDYLKEEEEFEKYRLNMVKLCREVERGITEDLHLSLDGKS |
| | | HLSFNDDVIKPYNDKYNVFNGDDLTFFINARNMFMHGDYKYECVK |
| | | YVVSEHFKGSLNDVSFAKETYGHFCNLLESMRKKTGLRIDI |
| 181 | Cas13 | MKKKISLKEQRNTKKAENKLKYQKAQAERAAAAQQ.TAAGAESEEN |
| | | PCFDVVKDTKRKALNPLHVEIEAPSAKKSSVKANGLKSLLLTDGKTV |
| | | MTSFGRGSEANVEKRFDETGTKTFDRDPELFSAKPLETGYRIQRFNA |
| | | SPKDAGLAYRPAGVRPDQIGAKAALEKRYFGKETPGDNIHVQIAYQI |
| | | QDIEKLLAVYISNIIYAVNNVTGVSAMKDSKGRPVDLLGDYGILGEEG |
| | | LTKRLQRIPEQADEEAKALQAFLCSERLSYFGKEFCLVRNSPKQPDKE |
| | | EKRQYKLMRVLCLLGELRQFLVHGKKKEKEFAWLYRLDRQLSQEYR |
| | | KLLGEFYDAQVDKVNKSFLTNSTVNLEVLFRALKTGTDPERKTVTQE |
| | | YYQFTVRKEDGNLGFSLKTLREILLSAYKHEVRDKEYDSIRHKLYQLFS |
| | | FALYHYYKTGVGAERREAFVAKLRAVMTAEAKQRAYADEAAEIWN |
| | | DEGSGIRAAFLEILEAVDFGSAVKGIKARSSVAGDKRFAEWLEEVRIR |
| | | PEGVSCFTKLMYLLTRFLDGKEINELLTGLINKLENIQSFLDVMQQEH |
| | | AETGLSDAFSFFEYSGEIAAELRMTRSFARMAAADPEAKRFMVVDG |
| | | AKLLGFNPKDTESEDEGIIRAIYGDACAEYLQFSEEEKEAFYVQEGLY |
| | | GKEREKFSPYAYFHTDTSLRNFIAKNVVESARFRYVIRYVSPEIARKYA |
| | | RQEALVRFALHRVPLLQLRRYYQSCCGPKKDPDAAECVDFLAGVVN |
| | | RVDFANFTDVRTGDSSKSEQEKKQKYQAIVGLYLTVVYWIVKNLVN |
| | | VNSRYVMAFHILERDTVLLEGKRLFVGGMKAEDPFLLTDGYVSRQD |
| | | AYVRKRIGENKRANRHGLNCVLENRNALGSDPASTDAAASLIWSYR |
| | | NAAAHLTAVAAAQEYVSELREIHSYFEVYHYAMQRYLKSGAEFAELV |
| | | SKNGPASGKIAAWANAVDRCHSFCKDWLWLLNVPFAYNPARYKN |
| | | LSIANLFDKNEAAPVTEDASEQKEDE |
| 182 | Cas13 | MGAIENKHIFAAYANLAIDGLIKTLNFIAKKLDTQKQLSSWDIKHVITL |
| | | IDSIFDQNPQNNLEQVVEGYLPWIKPIIEMKTPKKGERQSDKLCIEYK |
| | | TIITAFASLLNDVRNYYTHYYHDPICIYPGGYDIPSSLNCIYDSAINIIKE |
| | | RFQAEEKEMEHLRRYTRKKGRVVLKTEDDHFYYTLANNNDLSEKGY |
| | | AFFISMFLERKYSYLFLKKLSGFKRGDSLQYRLTLEVFTALSTKPPVERL |
| | | RTTKDTKQDRALDILNELSKIPIELYQTLEPKYREMYNETLQPTDAED |
| | | PYGLPDRSRIRFRSRFEAFALHFLDKQADFKEIGFYTYLGNYFHNGYQ |
| | | KTRVDRETKDRYINFQLAGFCKNIQDISAKKLSEALNVKSIDISTDSIP |
| | | DINSFEPYLVQSTPHYIVNGNNIGIKVLPEGKDTYPTIDEKGAKMPIA |
| | | DFWLSKYELPAMLFYTYLRNNNIHKSHCPLSVKDIIERSIHKSTKOKH |
| | | PEERSELMLRRVMKAIFWTDSKLNEVERIKSQKSAFGKRQHEILKAG |
| | | RIAETLVRDMLWLQPSKNNGRDKVTEPNFQAIQVSLAYFGIRRNDL |
| | | TEIFTRAGLINSSNPHPFLAQIGTNYTSLIEFYIAYLKERKVYFSRIOKKI |
| | | LQGKLNIQCHPLRDLQREPNKPQEKEEAIFLPRGLFNEAIINCLKKSKL |
| | | KHLIESPTREKSPALNVSYLIQNYFRAYFEDQSQEFYAQPRNYRLFDN |
| | | LSPNKGKSKSYLSLEQRIKKMEELRPSKIPVAEANKLLEKEDRLYRKNY |
| | | NEICDNESIIRLYQIQDILLFMMTKEYLPSDLYNRINKYKLENVKGILN |
| | | ERVSYLIDLNPLKIQGEDIKIKDYGKLFYIHHDTRISSLNKVLSKVKRNN |
| | | SISSSVKIQPYENYKRECLDFEEAQIQIIPIIHSFEIAMVSMFPDLKKAT |
| | | PGNYYDFNELITEYEKRTKQKIDSSFLIKTRNMFLHDKYEAECIKEISD |
| | | DFVYAKKIIAEFKMKIENIKLEDFSNDSSA |
| 183 | Cas13 | MGAIENKHIFAAYANLAIDGLIKTLNFIAKKLDTQKQLSSWDIKHVITL |
| | | IDSIFDQNPQNNLEQVVEGYLPWIKPIIEMKTPKKGERQSDKLCIEYK |
| | | TIITAFASLLNDVRNYYTHYYHDPICIYPRGYDIPSSLNCIYDSAINIIKE |
| | | RFQAEEKEMEHLRNYTLVNNNGLSEKGYAFFISKFLERKYSYLFLKKL |
| | | SGFKRGDSLQYRLTLEVFTALSTKPPVERLRTTKDTKQDRALDILNELS |
| | | RIPIELYQTLEPKYREMYNETLQPTDAEDPYGLPDRSRIRFRSRFEAFA |
| | | LHFLDKQADFKEIGFYTYLGNYFHNGYQKTRVDRETKDRYINFQLAG |
| | | FCKNIQDISAKKLSEALNVKSIDISTDSIPDINSFEPYLVQSTPHYIVNG |
| | | NNIGIKVLPEGKDTYPTIDEKGAKMPIADFWLSKYELPAMLFYTYLR |
| | | NNNIHKSHCPLSVKDIIERSIHKSTKQKHPEERSELMLRRVMKAIFWT |
| | | DSKLNEVERIKSQKSAFGKRQHEILKAGRIAETLVRDMLWLQPSKNN |
| | | GRDKVTEPNFQAIQVSLAYFGIRRNDLTEIFTRAGLINSSNPHPFLAQ |
| | | IGTNYTSLIEFYIAYLKERKVYFSRIQKKILQGKLNIQCHPLRDLQREPN |
| | | KPQEKEEAIFLPRGLFNEAIINCLKKSKLKHLIESPTREKSPALNVSYLIH |
| | | NYFRAYFEDQSQEFYAQPRNYRLFDKLSPNKGKSKSYLSLEQRIKKM |
| | | EELRPSKIPVAEANKLLEKEDRLYRKNYNEICDNESIIRLYQIQDILLFM |
| | | MTKEYLPSDLYNRINKYKLENVKGILNERVSYLIDLNPLKIQGEDIKIK |
| | | DYGKLFYIHHDTRISSLNKVLSKVKRNNSISSSVKIQPYENYKRECLDF |
| | | EEAQIQIIPIIHSFEIAMVSMFPDLKKATPGNYYDFNELITEYEKRTKQ |
| | | KIDSSFLIKTRNMFLHDKYEAECIKEISDDFVYAKKIIAEFKMKIENIKLE |
| | | DLSNDSSA |
| 184 | Cas13 | CILDFFTQDKAIAEYQLGVEFLQKNLPVIRYLYLPTSHKRFENVPKNQ |
| | | LISEQRNYFKNSLKVLKNLIRDYRNFYTHHFHKPIPVFPETYKLLDDLF |
| | | LAVANDVKKHRMKTDASKQLLKKGLIEELAQLEKLKLEDLKKLKREG |
| | | KKVNLNDKEAITNAILNDSFSHLLPKENTISKYYSAVPTEDIDTENGVT |
| | | ISESGIIFLLGLFLTKKQSEDLRSRVKGFKAKLIVNPENPINKKNNSLKY |
| | | MATHWVFGYLGFKGLKNRFTTTFTKDTLLAQIVDELSKVPDELYQVL |
| | | PEELKNEFLEDMNEYLKEENSESLDKATVIHPVIRKRYENKFAYFALR |
| | | FLDEFVDFPTLRFQLHLGNYVHDKREKPIEGTKYVTERIVKEKIKAFAK |
| | | LSEAAQLKQKYFEEKENHQSIGLQLYPNPSYNFVGNNIPIHLNLNEH |
| | | FFPKEVKIVAGRLKKRNSSYKSDHPEEYKVRTDNKIKPDAILQDLGKP |
| | | EKLAPVAMLSLNELPALLHLVLTKKTPEEIEIIIAQKIAERYNVLTNYKA |
| | | GDDISKGQITKNLLKAKQKKEVNLDKLQLAIEKEIAVTNDKLQTIALHI |
| | | KERNDPKQKRKYVFTNKEIGLQVTWLANDLKRFMPKGSRQNWRG |
| | | QHHSQLQKSLAFYDIQPKEPLSLLEEVWDFKNEAYLWNNGIRRSFD |
| | | KRDFISFYTSYLNNRKETFQRFKDQLNGIRSNKKILDKFIKQQHLWNL |
| | | FHKRLYVIDTIEEQVEKLLVKPMQFPKGVFDHKPTYIKGKSIQENPEC |
| | | FADWYVAWNQHTDYQKFYSWDRDYKSAYLSGEQEKTEKRFIRVQ |
| | | GSKINKVKQQDVLLAKMASIIFNELYLPEDAEHLDLNLSDIYKTQTER |
| | | KAEIEAALIQSHKTTGDNSANIIKSTSAWTLTVPYCSKNIYEPQVKLKE |
| | | LGKFKKFIASQKVQTLFEYKPQKIWNKTELEEVLELKANSYEVIRRDYL |
| | | LKSIQEFEKYMIKKLPTLIDTNEHPNFNKYLTTFLKSLELVSEEDAKWLI |
| | | SKKDFDTTPIDELKKQSKIMEKAFLLVMIRNKFSHNQLPRKIYYDEIYK |
| | | NVPNAVSINFNELFLEYTNQTILEFK |
| 185 | Cas13 | NRRDMEASPGRLARYIVLKTLYERAFPRWLEAREAETLNGWIGRAA |
| | | DRATVAARHINKDENAAARMAGLVRLADGKGIADFTDRLAAETAS |
| | | EYRVQRGYDSDPAVARKQAKHIEDLRCDVVGQAFEAYLADVARKL |
| | | AWTMNDPPGGPLPDEKKASLETAAPPAEDAGAEAEEDWLARLYFL |
| | | LHMLPVEEVGGLRHQLRKWSVLEREPDSVLEREPDADVEAIERILGL |
| | | YLDMHDAKFEGGDGVAGAEALTDLFTSPAQFRRVCPEDGAGNGG |
| | | HVPWRGLREMLRFGGGEPRLMWAFRKWPIGDGMVDGLNALEAT |
| | | VAEAHKQREDLHAKWAGKKGFSRKDKDEYRAALETVVVHRHLAAH |
| | | VQLVNHARLHRLAMAVLARLADYAGLWERDLYFTTLALIRLENGKP |
| | | EDVFRSRELEWLREGRIVDALKELKKNADGSEPAVGTALQRLFGKGI |
| | | LTGGGTVSVRRDLLHFNMLQRKANEPFNLTTAVNDTRKLMAYDRK |
| | | LKNAVSRSIIELLAREGLDLAWEMKDHQLAGAVLKTRQAVHLGGAK |
| | | VGGGPITEDLHGPEFTAMAAALFGGEARAATDAAEAATGRPDRRE |
| | | RKSGGASPRPARPAKTLPAPTPRLLPAAGERVEGVLVEEKTRKGGW |
| | | KAAVEIGGPRIVGDIFNSGEVPSDAEPGLEAEFVVRVANPANASFM |
| | | WLSPDVEERLKKAAAPRRGGRPAGRQR |
| 186 | Cas13 | MGAIENKHIFAAYANLAIDGLIKTLNFIAKKLDTQKQLSSWDIKHVITL |
| | | IDSIFDQNPQNNLEQVVEGYLPWIKPIIEMKTPKKGERQSDKLCIEYK |
| | | TIITAFASLLNDVRNYYTHYYHDPICIYPGGYDIPSSLNCIYDSAINIIKE |
| | | RFQAEEKEMEHLRRYTRKKGRVVLKTEDDHFYYTLANNNDLSEKGY |
| | | AFFISMFLERKYSYLFLKKLSGFKRGDSLQYRLTLEVFTALSTKPPVERL |
| | | RTTKDTKQDRALDILNELSKIPIELYQTLEPKYREMYNETLOPTDAED |
| | | PYGLPDRSRIRFRSRFEAFALHFLDKQADFKEIGFYTYLGNYFHNGYQ |
| | | KTRVDRETKDRYINFQLAGFCKNIQDISAKKLSEALNVKSIDISTDSIP |
| | | DINSFEPYLVQSTPHYIVNGNNIGIKVLPEGKDTYPTIDEKGAKMPIA |
| | | DFWLSKYELPAMLFYTYLRNNNIHKSHCPLSVKDIIERSIHKSTKOKH |
| | | PEERSELMLRRVMKAIFWTDSKLNEVERIKSQKSAFGKRQHEILKAG |
| | | RIAETLVRDMLWLQPSKNNGRDKVTEPNFQAIQVSLAYFGIRRNDL |
| | | TEIFTRAGLINSSNPHPFLAQIGTNYTSLIEFYIAYLKERKVYFSRIOKKI |
| | | LQGKLNIQCHPLRDLQREPNKPQEKEEAIFLPRGLFNEAIINCLKKSKL |
| | | KHLIESPTREKSPALNVSYLIQNYFRAYFEDQSQEFYAQPRNYRLFDN |
| | | LSPNKGKSKSYLSLEQRIKKMEELRPSKIPVAEANKLLEKEDRLYRKNY |
| | | NEICDNESIIRLYQIQDILLFMMTKEYLPSDLYNRINKYKLENVKGILN |
| | | ERVSYLIDLNPLKIQGEDIKIKDYGKLFYIHHDTRISSLNKVLSKVKRNN |
| | | SISSSVKIQPYENYKRECLDFEEAQIQIIPIIHSFEIAMVSMFPDLKKAT |
| | | PGNYYDFNELITEYEKRTKQKIDSSFLIKTRNMFLHDKYEAECIKEISD |
| | | DFVYAKKIIAEFKMKIENIKLEDFSNDSSA |
| 187 | Cas13 | MGAIENKHIFAAYANLAIDGLIKTLNFIAKKLDTQKQLSSWDIKFMTL |
| | | IDSIFDQNPQNNLEQVVEGYLPWIKPIIEMKTPKKGERQSDKLCIEYK |
| | | TIITAFASLLNDVRNYYTHYYHDPICIYPRGYDIPSSLNCIYDSAINIIKE |
| | | RFQAEEKEMEHLRNYTLVNNNGLSEKGYAFFISKFLERKYSYLFLKKL |
| | | SGFKRGDSLQYRLTLEVFTALSTKPPVERLRTTKDTKQDRALDILNELS |
| | | RIPIELYQTLEPKYREMYNETLQPTDAEDPYGLPDRSRIRFRSRFEAFA |
| | | LHFLDKQADFKEIGFYTYLGNYFHNGYQKTRVDRETKDRYINFQLAG |
| | | FCKNIQDISAKKLSEALNVKSIDISTDSIPDINSFEPYLVQSTPHYIVNG |
| | | NNIGIKVLPEGKDTYPTIDEKGAKMPIADFWLSKYELPAMLFYTYLR |
| | | NNNIHKSHCPLSVKDIIERSIHKSTKQKHPEERSELMLRRVMKAIFWT |
| | | DSKLNEVERIKSQKSAFGKRQHEILKAGRIAETLVRDMLWLQPSKNN |
| | | GRDKVTEPNFQAIQVSLAYFGIRRNDLTEIFTRAGLINSSNPHPFLAQ |
| | | IGTNYTSLIEFYIAYLKERKVYFSRIQKKILQGKLNIQCHPLRDLQREPN |
| | | KPQEKEEAIFLPRGLFNEAIINCLKKSKLKHLIESPTREKSPALNVSYLIH |
| | | NYFRAYFEDQSQEFYAQPRNYRLFDKLSPNKGKSKSYLSLEQRIKKM |
| | | EELRPSKIPVAEANKLLEKEDRLYRKNYNEICDNESIIRLYQIQDILLFM |
| | | MTKEYLPSDLYNRINKYKLENVKGILNERVSYLIDLNPLKIQGEDIKIK |
| | | DYGKLFYIHHDTRISSLNKVLSKVKRNNSISSSVKIQPYENYKRECLDF |
| | | EEAQIQIIPIIHSFEIAMVSMFPDLKKATPGNYYDFNELITEYEKRTKQ |
| | | KIDSSFLIKTRNMFLHDKYEAECIKEISDDFVYAKKIIAEFKMKIENIKLE |
| | | DLSNDSSA |
| 188 | Cas13 | MGAIENKHIFAAYANLAIDGLIKTLNFIAKKLDTQKQLSSWDIKHVITL |
| | | IDSIFDQNPQNNLEQVVEGYLPWIKPIIEMKTPKKGERQSDKLCIEYK |
| | | TIITAFASLLNDVRNYYTHYYHDPICIYPGGYDIPSSLNCIYDSAINIIKE |
| | | RFQAEEKEMEHLRRYTRKKGRVVLKTEDDHFYYTLANNNDLSEKGY |
| | | AFFISMFLERKYSYLFLKKLSGFKRGDSLQYRLTLEVFTALSTKPPVERL |
| | | RTTKDTKQDRALDILNELSKIPIELYQTLEPKYREMYNETLQPTDAED |
| | | PYGLPDRSRIRFRSRFEAFALHFLDKQADFKEIGFYTYLGNYFHNGYQ |
| | | KTRVDRETKDRYINFQLAGFCKNIQDISAKKLSEALNVKSIDISTDSIP |
| | | DINSFEPYLVQSTPHYIVNGNNIGIKVLPEGKDTYPTIDEKGAKMPIA |
| | | DFWLSKYELPAMLFYTYLRNNNIHKSHCPLSVKDIIERSIHKSTKQKH |
| | | PEERSELMLRRVMKAIFWTDSKLNEVERIKSQKSAFGKRQHEILKAG |
| | | RIAETLVRDMLWLQPSKNNGRDKVTEPNFQAIQVSLAYFGIRRNDL |
| | | TEIFTRAGLINSSNPHPFLAQIGTNYTSLIEFYIAYLKERKVYFSRIQKKI |
| | | LQGKLNIQCHPLRDLQREPNKPQEKEEAIFLPRGLFNEAIINCLKKSKL |
| | | KHLIESPTREKSPALNVSYLIQNYFRAYFEDQSQEFYAQPRNYRLFDN |
| | | LSPNKGKSKSYLSLEQRIKKMEELRPSKIPVAEANKLLEKEDRLYRKNY |
| | | NEICDNESIIRLYQIQDILLFMMTKEYLPSDLYNRINKYKLENVKGILN |
| | | ERVSYLIDLNPLKIQGEDIKIKDYGKLFYIHHDTRISSLNKVLSKVKRNN |
| | | SISSSVKIQPYENYKRECLDFEEAQIQIIPIIHSFEIAMVSMFPDLKKAT |
| | | PGNYYDFNELITEYEKRTKQKIDSSFLIKTRNMFLHDKYEAECIKEISD |
| | | DFVYAKKIIAEFKMKIENIKLEDFSNDSSA |
| 189 | Cas13 | MGAIENKHIFAAYANLAIDGLIKTLNFIAKKLDTQKQLSSWDIKHVITL |
| | | IDSIFDQNPQNNLEQVVEGYLPWIKPIIEMKTPKKGERQSDKLCIEYK |
| | | TIITAFASLLNDVRNYYTHYYHDPICIYPRGYDIPSSLNCIYDSAINIIKE |
| | | RFQAEEKEMEHLRNYTLVNNNGLSEKGYAFFISKFLERKYSYLFLKKL |
| | | SGFKRGDSLQYRLTLEVFTALSTKPPVERLRTTKDTKQDRALDILNELS |
| | | RIPIELYQTLEPKYREMYNETLQPTDAEDPYGLPDRSRIRFRSRFEAFA |
| | | LHFLDKQADFKEIGFYTYLGNYFHNGYQKTRVDRETKDRYINFQLAG |
| | | FCKNIQDISAKKLSEALNVKSIDISTDSIPDINSFEPYLVQSTPHYIVNG |
| | | NNIGIKVLPEGKDTYPTIDEKGAKMPIADFWLSKYELPAMLFYTYLR |
| | | NNNIHKSHCPLSVKDIIERSIHKSTKQKHPEERSELMLRRVMKAIFWT |
| | | DSKLNEVERIKSQKSAFGKRQHEILKAGRIAETLVRDMLWLQPSKNN |
| | | GRDKVTEPNFQAIQVSLAYFGIRRNDLTEIFTRAGLINSSNPHPFLAQ |
| | | IGTNYTSLIEFYIAYLKERKVYFSRIQKKILQGKLNIQCHPLRDLQREPN |
| | | KPQEKEEAIFLPRGLFNEAIINCLKKSKLKHLIESPTREKSPALNVSYLIH |
| | | NYFRAYFEDQSQEFYAQPRNYRLFDKLSPNKGKSKSYLSLEQRIKKM |
| | | EELRPSKIPVAEANKLLEKEDRLYRKNYNEICDNESIIRLYQIQDILLFM |
| | | MTKEYLPSDLYNRINKYKLENVKGILNERVSYLIDLNPLKIQGEDIKIK |
| | | DYGKLFYIHHDTRISSLNKVLSKVKRNNSISSSVKIQPYENYKRECLDF |
| | | EEAQIQIIPIIHSFEIAMVSMFPDLKKATPGNYYDFNELITEYEKRTKQ |
| | | KIDSSFLIKTRNMFLHDKYEAECIKEISDDFVYAKKIIAEFKMKIENIKLE |
| | | DLSNDSSA |
| 190 | Cas13 | MEEANRYIYGAYFNMARDNFLNTIKLLADKMKLGATSGFGKDGNE |
| | | VNDINELFGDKNTYANIENVVEFYFPWIKALEGRFSLDKGDRNLND |
| | | MKMFYKSVLTAFFTAVDSLRNKYTHYSHKDLNIREIKIECTLGGKDYC |
| | | IGLLNALDCIYDSAVNLLKLRFMAGEYEVAHLRRCKAVNKKVVVRTE |
| | | KDGFYYRLSDNGGVTEKGVIFIASMFLNRKYGFLFLKQLEGFKRSDEK |
| | | RYRLTLETFLAFSNIKPVDRLKSDKLDRASLGLDMLNELTKIPRELSETL |
| | | SVDCLYKYLTSDGEDDLRSRIRYQDRFVPLALEFISQSDEFKDFRFYTY |
| | | VGNYVYKGYIKRLIDGTDKERYLSDRLCGFYKSVNDASSDAIAQKYG |
| | | VEIKDSNEPDYMLPDSFRPHVLRATPHFVINNNNIGIKICGNDCLPIV |
| | | NGKGVESPEPDYWLSIYELPAMLFYAYLREKNGKLLKDYKSIRELIED |
| | | VEKKADEKNDRDKGALMARHIDKEIIWTQTKLDEVKRLEEKKVAAY |
| | | GKKGRVVLKSGRMADLLAHDMVRLQPATKGSDKITGANFQALQVS |
| | | LAYFKRDILADVFSRAMLTTGNHRHPFLYRIDVSHCSSLRDFYVAYLG |
| | | ERRKYFEDVAKKIAKNKLNTPCHILRRLQREGSGEEAGKDVKPKFLPR |
| | | GIFTGSIKSCLEKSALNINIRNARNDVKPAINAAYLILMYYKEIEKGEFQ |
| | | GFYGEKRRYDILEEGKPLDLDERKKALASIKPAKIDVSEANMPMSKEE |
| | | HLMRKRYHAVCNNESAIRMYQVQDILLLLMAKDIFKKALSEGVMSK |
| | | KIGLENLNGIFDAPVNFVKNFDNIKLTATGIKIKDYGKVCRLGTDFKF |
| | | NSLVKAFHKVYSKSVEMDYSDYLKEEEEFEKYRLNMVKLCREVERGI |
| | | TEDLHLSLDGKSHLGFNDDVIKPYNDKYNVFNGGDLTFFINARNMF |
| | | MHGDYKYECVKYVVSEHFKGSLNDVSFAKETYGHFCNLLESMRKKT |
| | | GLRIDI |
| 191 | Cas13 | MGAIKNKHIFAAYANLAIDGLIKTLNFIAKKLDTQKQLSSWDIKHVIT |
| | | LIDSIFDQNPQNNLEQVVEGYLPWIKPIIEMKTPKKGERQSDKLCIEY |
| | | KTIITAFASLLNDVRNYYTHYYHDPICIYPGGYDIPSSLNCIYDSAINIIK |
| | | ERFQAEEKEMEHLRRYTRKKGRVVLKTEDDHFYYTLANNNDLSEKG |
| | | YAFFISMFLERKYSYLFLKKLSGFKRGDSLQYRLTLEVFTALSTKPPVER |
| | | LRTTKDTKQDRALDILNELSKIPIELYQTLEPKYREMYNETLQPTDAE |
| | | DPYGLPDRSRIRFRSRFEAFALHFLDKQADFKEIGFYTYLGNYFHNGY |
| | | QKTRVDRETKDRYINFQLAGFCKNIQDISAKKLSEALNVKSIDISTDSI |
| | | PDINSFEPYLVQSTPHYIVNGNNIGIKVLPEGKDTYPTIDEKGAKMPI |
| | | ADFWLSKYELPAMLFYTYLRNNNIHKSHCPLSVKDIIERSIHKSTKOK |
| | | HPEERSELMLRRVMKAIFWTDSKLNEVERIKSQKSAFGKRQHEILKA |
| | | GRIAETLVRDMLWLQPSKNNGRDKVTEPNFQAIQVSLAYFGIRRND |
| | | LTEIFTRAGLINSSNPHPFLAQIGTNYTSLIEFYIAYLKERKVYFSRIOKK |
| | | ILQGKLNIQCHPLRDLQREPNKPQDKEEAIFLPRGLFNEAIINCLKKSK |
| | | LKQLIESPTREKSPALNVSYLIQNYFRTYFEDQSQEFYAOPRNYRLFD |
| | | KLSPNKGKSKSYLSLEQRIKKMEELRPSKIPVAEANKLLEKEDRLYRKN |
| | | YNEICDNESIIRLYQIQDILLFMMTKEYLPSDLYNRINKYKLENVKGIL |
| | | NERVSYLIDLNPLKIQGEDIKIKDYGKLFYIHHDTRISSLNKVLSKVKRN |
| | | NSISSSVKIQPYENYKRECLDFEEAQIQIIPIIHSFEIAMVSMFPDLKKA |
| | | TPGNYYDFNELITEYEKRTKQKIGSSFLIKTRNMFLHDKYEAECIKEIS |
| | | DDFVYAKKIIAEFKMKIENIKLEDLSNDSSA |
| 192 | Cas13 | MGAIENKHIFAAYANLAIDGLIKTLNFIAKKLDTQKQLSSWDIKHVITL |
| | | IDSIFDQNPQNNLEQVVEGYLPWIKPIIEMKTPKKGERQSDKLCIEYK |
| | | TIITAFASLLNDVRNYYTHYYHDPICIYPGGYDIPSSLNCIYDSAINIIKE |
| | | RFQAEEKEMEHLRRYTRKKGRVVLKTEDDHFYYTLANNNDLSEKGY |
| | | AFFISMFLERKYSYLFLKKLSGFKRGDSLQYRLTLEVFTALSTKPPVERL |
| | | RTTKDTKQDRALDILNELSKIPIELYQTLEPKYREMYNETLQPTDAED |
| | | PYGLPDRSRIRFRSRFEAFALHFLDKQADFKEIGFYTYLGNYFHNGYQ |
| | | KTRVDRETKDRYINFQLAGFCKNIQDISAKKLSEALNVKSIDISTDSIP |
| | | DINSFEPYLVQSTPHYIVNGNNIGIKVLPEGKDTYPTIDEKGAKMPIA |
| | | DFWLSKYELPAMLFYTYLRNNNIHKSHCPLSVKDIIERSIHKSTKQKH |
| | | PEERSELMLRRVMKAIFWTDSKLNEVERIKSQKSAFGKRQHEILKAG |
| | | RIAETLVRDMLWLQPSKNNGRDKVTEPNFQAIQVSLAYFGIRRNDL |
| | | TEIFTRAGLINSSNPHPFLAQIGTNYTSLIEFYIAYLKERKVYFSRIQKKI |
| | | LQGKLNIQCHPLRDLQREPNKPQEKEEAIFLPRGLFNEAIINCLKKSKL |
| | | KHLIESPTREKSPALNVSYLIQNYFRAYFEDQSQEFYAQPRNYRLFDN |
| | | LSPNKGKSKSYLSLEQRIKKMEELRPSKIPVAEANKLLEKEDRLYRKNY |
| | | NEICDNESIIRLYQIQDILLFMMTKEYLPSDLYNRINKYKLENVKGILN |
| | | ERVSYLIDLNPLKIQGEDIKIKDYGKLFYIHHDTRISSLNKVLSKVKRNN |
| | | SISSSVKIQPYENYKRECLDFEEAQIQIIPIIHSFEIAMVSMFPDLKKAT |
| | | PGNYYDFNELITEYEKRTKQKIDSSFLIKTRNMFLHDKYEAECIKEISD |
| | | DFVYAKKIIAEFKMKIENIKLEDFSNDSSA |
| 193 | Cas13 | MGAIENKHIFAAYANLAIDGLIKTLNFIAKKLDTQKQLSSWDIKHVITL |
| | | IDSIFDQNPQNNLEQVVEGYLPWIKPIIEMKTPKKGERQSDKLCIEYK |
| | | TIITAFASLLNDVRNYYTHYYHDPICIYPGGYDIPSSLNCIYDSAINIIKE |
| | | RFQAEEKEIEHLRRYTRKKGRVVLKTEDDHFYYTLVNNNDLSEKGYA |
| | | FFISMFLERKYSYLFLKKLSGFKRGDSLQYRLTLEVFTALSTKPPVERLR |
| | | TTKDTKQDRALDILNELSRIPIELYQTLEPKYREMYNETLQPTDAEDP |
| | | YGLPDRSRIRFRSRFEAFALHFLDKQADFKEIGFYTYLGNYFHNGYOK |
| | | TRVDRETKDRYINFQLAGFCKNIQDISAKKLSEALNVKSIDISTDSIPDI |
| | | NSFEPYLVQSTPHYIVNGNNIGIKVLPEGKDTYPTIDEKGAKMPIADF |
| | | WLSKYELPAMLFYTYLRNNNIHKSHCPLSVKDIIERSIHKSTKOKHPE |
| | | ERSELMLRRVMKAIFWTDSKLNEVERIKSQKSAFGKRQHEILKAGRI |
| | | AETLVRDMLWLQPSKNNGRDKVTEPNFQAIQVSLAYFGIRRNDLTE |
| | | IFTRAGLINSSNPHPFLAQIGTNYTSLIEFYIAYLKERKVYFSRIQKKILO |
| | | GKLNIQCHPLRDLQREPNKPQDKEEAIFLPRGLFNEAIINCLKKSKLK |
| | | QLIESPTREKSPALNVSYLIQNYFRTYFEDQSQEFYAQPRNYRLFDKL |
| | | SPNKGKSKSYLSLEQRIKKMEELRPSKIPVAEANKLLEKEDRLYRKNY |
| | | NEICDNESIIRLYQIQDILLFMMTKEYLPSDLYNRINKYKLENVKGILN |
| | | ERVSYLIDLNPLKIQGEDIKIKDYGKLFYIHHDTRISSLNKVLSKVKRNN |
| | | SISSSVKIQPYENYKRECLDFEEAQIQIIPIIHSFEIAMVSMFPDLKKAT |
| | | PGNYYDFNELITEYEKRTKQKIDSSFLIKTRNMFLHDKYEAECIKEISD |
| | | DFVYAKKIIAEFKMKIENIKLEDLSNDSSA |
| 194 | Cas13 | MGAIENKHIFAAYANLAIDGLIKTLNFIAKKLDTQKQLSSWDIKHVITL |
| | | IDSIFDQNPQNNLEQVVEGYLPWIKPIIEMKTPKKGERQSDKLCIEYK |
| | | TIITAFASLLNDVRNYYTHYYHDPICIYPGGYDIPSSLNCIYDSAINIIKE |
| | | RFQAEEKEMEHLRRYTRKKGRVVLKTEDDHFYYTLANNNDLSEKGY |
| | | AFFISMFLERKYSYLFLKKLSGFKRGDSLQYRLTLEVFTALSTKPPVERL |
| | | RTTKDTKQDRALDILNELSKIPIELYQTLEPKYREMYNETLQPTDAED |
| | | PYGLPDRSRIRFRSRFEAFALHFLDKQADFKEIGFYTYLGNYFHNGYQ |
| | | KTRVDRETKDRYINFQLAGFCKNIQDISAKKLSEALNVKSIDISTDSIP |
| | | DINSFEPYLVQSTPHYIVNGNNIGIKVLPEGKDTYPTIDEKGAKMPIA |
| | | DFWLSKYELPAMLFYTYLRNNNIHKSHCPLSVKDIIERSIHKSTKQKH |
| | | PEERSELMLRRVMKAIFWTDSKLNEVERIKSQKSAFGKRQHEILKAG |
| | | RIAETLVRDMLWLQPSKNNGRDKVTEPNFQAIQVSLAYFGIRRNDL |
| | | TEIFTRAGLINSSNPHPFLAQIGTNYTSLIEFYIAYLKERKVYFSRIQKKI |
| | | LQGKLNIQCHPLRDLQREPNKPQEKEEAIFLPRGLFNEAIINCLKKSKL |
| | | KHLIESPTREKSPALNVSYLIQNYFRAYFEDQSQEFYAQPRNYRLFDN |
| | | LSPNKGKSKSYLSLEQRIKKMEELRPSKIPVAEANKLLEKEDRLYRKNY |
| | | NEICDNESIIRLYQIQDILLFMMTKEYLPSDLYNRINKYKLENVKGILN |
| | | ERVSYLIDLNPLKIQGEDIKIKDYGKLFYIHHDTRISSLNKVLSKVKRNN |
| | | SISSSVKIQPYENYKRECLDFEEAQIQIIPIIHSFEIAMVSMFPDLKKAT |
| | | PGNYYDFNELITEYEKRTKQKIDSSFLIKTRNMFLHDKYEAECIKEISD |
| | | DFVYAKKIIAEFKMKIENIKLEDFSNDSSA |
| 195 | Cas13 | MGAIENKHIFAAYANLAIDGLIKTLNFIAKKLDTQKQLSSWDIKHVITL |
| | | IDSIFDQNPQNNLEQVVEGYLPWIKPIIEMKTPKKGERQSDKLCIEYK |
| | | TIITAFASLLNDVRNYYTHYYHDPICIYPGGYDIPSSLNCIYDSAINIIKE |
| | | RFQAEEKEMEHLRRYTRKKGRVVLKTEDDHFYYTLANNNDLSEKGY |
| | | AFFISMFLERKYSYLFLKKLSGFKRGDSLQYRLTLEVFTALSTKPPVERL |
| | | RTTKDTKQDRALDILNELSKIPIELYQTLEPKYREMYNETLQPTDAED |
| | | PYGLPDRSRIRFRSRFETFALHFLDKQPDFKEIGFYTYLGNYFHNGYQ |
| | | KTRVDRETKDRYINFQLAGFCKNIQDISAKKLSEALNVKSIDISTDSIP |
| | | DINSFEPYLVQSMPHYIVNGNNIGIKVLPEGKDTYPTIDEKGAKMPI |
| | | ADFWLSKYELPAMLFYTYLRNNNIHKSHCPLSVKDIIERSIHKSTKQK |
| | | HPEERSELMLRRVMKAIFWTDSKLNEVERIKSQKSAFGKRQHEILKA |
| | | GRIAEMLVRDMLWLQPSKNNGRDKVTEPNFQAIQVSLAYFGIRRN |
| | | DLTEIFTRAGLINSSNPHPFLAQIGTNYTSLIEFYIAYLKERKVYFSRIQK |
| | | KILQGKLNIQCHPLRDLQREPNKPQEKEEAIFLPRGLFNEAIINCLKKS |
| | | KLKQLIESPTREKSPALNVSYLIQNYFRAYFEDQSQEFYAQPRNYRLF |
| | | DKLSPNKGKSKSYLSLEQRIKKMEELRPSKIPVAEANKLLEKEDRLYRK |
| | | NYNEICDNESIIRLYQIQDILLFMMTKEYLPSDLYNRINKYKLENVKGI |
| | | LNERVSYLIDLNPLKIQGEDIKIKDYGKLFYIHHDTRISSLNKVLSKVKR |
| | | NNSISSSVKIQPYENYKRECLDFEEAQIQIIPIIHSFEIAMVSMFPDLKK |
| | | ATPGNYYDFNELITEYEKRTKQKIDSSFLIKTRNMFLHDKYEAECIKEIS |
| | | DDFVYAKKIIAEFKMKIENIKLEDLSNDSSA |
| 196 | Cas13 | MGAIENKHIFAAYANLAIDGLIKTLNFIAKKLDTQKQLSSWDIKHVITL |
| | | IDSIFDQNPQNNLEQVVEGYLPWIKPIIEMKTPKKGERQSDKLCIEYK |
| | | TIITAFASLLNDVRNYYTHYYHDPICIYPRGYDIPSSLNCIYDSAINIIKE |
| | | RFQAEEKEMEHLRNYTLVNNNGLSEKGYAFFISKFLERKYSYLFLKKL |
| | | SGFKRGDSLQYRLTLEVFTALSTKPPVERLRTTKDTKQDRALDILNELS |
| | | RIPIELYQTLEPKYREMYNETLQPTDAEDPYGLPDRSRIRFRSRFEAFA |
| | | LHFLDKQADFKEIGFYTYLGNYFHNGYQKTRVDRETKDRYINFQLAG |
| | | FCKNIQDISAKKLSEALNVKSIDISTDSIPDINSFEPYLVQSTPHYIVNG |
| | | NNIGIKVLPEGKDTYPTIDEKGAKMPIADFWLSKYELPAMLFYTYLR |
| | | NNNIHKSHCPLSVKDIIERSIHKSTKQKHPEERSELMLRRVMKAIFWT |
| | | DSKLNEVERIKSQKSAFGKRQHEILKAGRIAETLVRDMLWLQPSKNN |
| | | GRDKVTEPNFQAIQVSLAYFGIRRNDLTEIFTRAGLINSSNPHPFLAQ |
| | | IGTNYTSLIEFYIAYLKERKVYFSRIQKKILQGKLNIQCHPLRDLQREPN |
| | | KPQEKEEAIFLPRGLFNEAIINCLKKSKLKHLIESPTREKSPALNVSYLIH |
| | | NYFRAYFEDQSQEFYAQPRNYRLFDKLSPNKGKSKSYLSLEQRIKKM |
| | | EELRPSKIPVAEANKLLEKEDRLYRKNYNEICDNESIIRLYQIQDILLFM |
| | | MTKEYLPSDLYNRINKYKLENVKGILNERVSYLIDLNPLKIQGEDIKIK |
| | | DYGKLFYIHHDTRISSLNKVLSKVKRNNSISSSVKIQPYENYKRECLDF |
| | | EEAQIQIIPIIHSFEIAMVSMFPDLKKATPGNYYDFNELITEYEKRTKQ |
| | | KIDSSFLIKTRNMFLHDKYEAECIKEISDDFVYAKKIIAEFKMKIENIKLE |
| | | DLSNDSSA |
| 197 | Cas13 | MGAIENKHIFAAYANLAIDGLIKTLNFIAKKLDTQKQLSSWDIKHVITL |
| | | IDSIFDQNPQNNLEQVVEGYLPWIKPIIEMKTPKKGERQSDKLCIEYK |
| | | TIITAFASLLNDVRNYYTHYYHDPICIYPGGYDIPSSLNCIYDSAINIIKE |
| | | RFQAEEKEIEHLRRYTRKKGRVVLKTEDDHFYYTLVNNNDLSEKGYA |
| | | FFISMFLERKYSYLFLKKLSGFKRGDSLQYRLTLEVFTALSTKPPVERLR |
| | | TTKDTKQDRALDILNELSRIPIELYQTLEPKYREMYNETLOPTDAEDP |
| | | YGLPDRSRIRFRSRFEAFALHFLDKQADFKEIGFYTYLGNYFHNGYQK |
| | | TRVDRETKDRYINFQLAGFCKNIQDISAKKLSEALNVKSIDISTDSIPDI |
| | | NSFEPYLVQSTPHYIVNGNNIGIKVLPEGKDTYPTIDEKGAKMPIADF |
| | | WLSKYELPAMLFYTYLRNNNIHKSHCPLSVKDIIERSIHKSTKQKHPE |
| | | ERSELMLRRVMKAIFWTDSKLNEVERIKSQKSAFGKRQHEILKAGRI |
| | | AETLVRDMLWLQPSKNNGRDKVTEPNFQAIQVSLAYFGIRRNDLTE |
| | | IFTRAGLINSSNPHPFLAQIGTNYTSLIEFYIAYLKERKVYFSRIQKKILQ |
| | | GKLNIQCHPLRDLQREPNKPQDKEEAIFLPRGLFNEAIINCLKKSKLK |
| | | QLIESPTREKSPALNVSYLIQNYFRTYFEDQSQEFYAQPRNYRLFDKL |
| | | SPNKGKSKSYLSLEQRIKKMEELRPSKIPVAEANKLLEKEDRLYRKNY |
| | | NEICDNESIIRLYQIQDILLFMMTKEYLPSDLYNRINKYKLENVKGILN |
| | | ERVSYLIDLNPLKIQGEDIKIKDYGKLFYIHHDTRISSLNKVLSKVKRNN |
| | | SISSSVKIQPYENYKRECLDFEEAQIQIIPIIHSFEIAMVSMFPDLKKAT |
| | | PGNYYDFNELITEYEKRTKQKIDSSFLIKTRNMFLHDKYEAECIKEISD |
| | | DFVYAKKIIAEFKMKIENIKLEDLSNDSSA |
| 198 | Cas13 | MGAIENKHIFAAYANLAIDGLIKTLNFIAKKLDTQKQLSSWDIKFMTL |
| | | IDSIFDQNPQNNLEQVVEGYLPWIKPIIEMKTPKKGERQSDKLCIEYK |
| | | TIITAFASLLNDVRNYYTHYYHDPICIYPGGYDIPSSLNCIYDSAINIIKE |
| | | RFQAEEKEMEHLRRYTRKKGRVVLKTEDDHFYYTLANNNDLSEKGY |
| | | AFFISMFLERKYSYLFLKKLSGFKRGDSLQYRLTLEVFTALSTKPPVERL |
| | | RTTKDTKQDRALDILNELSRIPIELYQTLEPKYREMYNETLQPTDAED |
| | | PYGLPDRSRIRFRSRFEAFALHFLDKQADFKEIGFYTYLGNYFHNGYQ |
| | | KTRVDRETKDRYINFQLAGFCKNIQDISAKKLSEALNVKSIDISTDSIP |
| | | DINSFEPYLVQSTPHYIVNGNNIGIKVLPEGKDTYPTIDEKGAKMPIA |
| | | DFWLSKYELPAMLFYTYLRNNNIHKSHCPLSVKDIIERSIHKSTKQKH |
| | | PEERSELMLRRVMKAIFWTDSKLNEVERIKSQKSAFGKRQHEILKAG |
| | | RIAETLVRDMLWLQPSKNNGRDKVTEPNFQAIQVSLAYFGIRRNDL |
| | | TEIFTRAGLINSSNPHPFLAQIGTNYTSLIEFYIAYLKERKVYFSRIOKKI |
| | | LQGKLNIQCHPLRDLQREPNKPQEKEEAIFLPRGLFNEAIINCLKKSKL |
| | | KQLIESPTREKSPALNVSYLILNYFRTYFEDQSQEFYAQPRNYRLFDKL |
| | | SPNKGKSKSYLSLEQRIKKMEELRPSKIPVAEANKLLEKEDRLYRKNY |
| | | NEICDNESIIRLYQIQDILLFMMTKEYLPSDLYNRINKYKLENVKGILN |
| | | ERVSYLIDLNPLKIQGEDIKIKDYGKLFYIHHDTRINSLNKVLSKVKRN |
| | | NSISSSVKIQPYENYKRECLDFEEAQIQIIPIIHSFEIAMVSMFPDLKKA |
| | | TPGNYYDFNELITEYEKRTKQKIDSSFLIKTRNMFLHDKYEAECIKEIS |
| | | DDFVYAKKIIAEFKMKIENIKLEDFSNDSSA |
| 199 | Cas13 | MGAIENKHIFAAYANLAIDGLIKTLNFIAKKLDTQKQLSSWDIKHVITL |
| | | IDSIFDQNPQNNLEQVVEGYLPWIKPIIEMKTPKKGERQSDKLCIEYK |
| | | TIITAFASLLNDVRNYYTHYYHDPICIYPGGYDIPSSLNCIYDSAINIIKE |
| | | RFQAEEKEMEHLRRYTRKKGRVVLKTEDDHFYYTLANNNDLSEKGY |
| | | AFFISMFLERKYSYLFLKKLSGFKRGDSLQYRLTLEVFTALSTKPPVERL |
| | | RTTKDTKQDRALDILNELSKIPIELYQTLEPKYREMYNETLQPTDAED |
| | | PYGLPDRSRIRFRSRFEAFALHFLDKQADFKEIGFYTYLGNYFHNGYQ |
| | | KTRVDRETKDRYINFQLAGFCKNIQDISAKKLSEALNVKSIDISTDSIP |
| | | DINSFEPYLVQSTPHYIVNGNNIGIKVLPEGKDTYPTIDEKGAKMPIA |
| | | DFWLSKYELPAMLFYTYLRNNNIHKSHCPLSVKDIIERSIHKSTKQKH |
| | | PEERSELMLRRVMKAIFWTDSKLNEVERIKSQKSAFGKRQHEILKAG |
| | | RIAETLVRDMLWLQPSKNNGRDKVTEPNFQAIQVSLAYFGIRRNDL |
| | | TEIFTRAGLINSSNPHPFLAQIGTNYTSLIEFYIAYLKERKVYFSRIQKKI |
| | | LQGKLNIQCHPLRDLQREPNKPQEKEEAIFLPRGLFNEAIINCLKKSKL |
| | | KHLIESPTREKSPALNVSYLIQNYFRAYFEDQSQEFYAQPRNYRLFDK |
| | | LSPNKGKSKSYLSLEQRIKKMEELRPSKIPVAEANKLLEKEDRLYRKNY |
| | | NEICDNESIIRLYQIQDILLFMMTKEYLPSDLYNRINKYKLENVKGILN |
| | | ERVSYLIDLNPLKIQGEDIKIKDYGKLFYIHHDTRISSLNKVLSKVKRNN |
| | | SISSSVKIQPYENYKRECLDFEEAQIQIIPIIHSFEIAMVSMFPDLKKAT |
| | | PGNYYDFNELITEYEKRTKQKIDSSFLIKTRNMFLHDKYEAECIKEISD |
| | | DFVYAKKIIAEFKMKIENIKLEDLSNDSSA |
| 200 | Cas13 | MGAIENKHIFAAYANLAIDGLIKTLNFIAKKLDTQKQLSSWDIKHVITL |
| | | IDSIFDQNPQNNLEQVVEGYLPWIKPIIEMKTPKKGERQSDKLCIEYK |
| | | TIITAFASLLNDVRNYYTHYYHDPICIYPGGYDIPSSLNCIYDSAINIIKE |
| | | RFQAEEKEMEHLRRYTRKKGRVVLKTEDDHFYYTLANNNDLSKKGY |
| | | AFFISMFLERKYSYLFLKKLSGFKRGDSLQYRLTLEVFTALSTKPPVERL |
| | | RTTKDTKQDRALDILNELSRIPIELYQTLEPKYREMYNETLQPTDAED |
| | | PYGLPDRSRIRFRSRFEAFALHFLDKQADFKEIGFYTYLGNYFHNGYO |
| | | KTRVDRETKDRYINFQLAGFCKNIQDISAKKLSEALNVKSIDISTDSIP |
| | | DINSFEPYLVQSTPHYIVNGNNIGIKVLPEGKDTYPTIDEKGAKMPIA |
| | | DFWLSKYELPAMLFYTYLRNNNIHKSHCPLSVKDIIERSIHKSTKOKH |
| | | PEERSELMLRRVMKAIFWTDSKLNEVERIKSQKSAFGKRQHEILKAG |
| | | RIAETLVRDMLWLQPSKNNGRDKVTEPNFQAIQVSLAYFGIRRNDL |
| | | TEIFTRAGLINSSNPHPFLAQIGTNYTSLIEFYIAYLKERKVYFSRIOKKI |
| | | LQGKLNIQCHPLRDLQREPNKPQEKEEAIFLPRGLFNEAIINCLKKSKL |
| | | KQLIESPTREKSPALNVSYLILNYFRTYFEDQSQEFYAQPRNYRLFDKL |
| | | SPNKGKSKSYLSLEQRIKKMEELRPSKIPVAEANKLLEKEDRLYRKNY |
| | | NEICDNESIIRLYQIQDILLFMMTKEYLPSDLYNRINKYKLENVKGILN |
| | | ERVSYLIDLNPLKIQGEDIKIKDYGKLFYIHHDTRINSLNKVLSKVKRN |
| | | NSISSSVKIQPYENYKRECLDFEEAQIQIIPIIHSFEIAMVSMFPDLKKA |
| | | TPGNYYDFNELITEYEKRTKQKIDSSFLIKTRNMFLHDKYEAECIKEIS |
| | | DDFVYAKKIIAEFKMKIENIKLEDFSNDSSA |
| 201 | Cas13 | MKHVFAAYFSDARLNIMASLNDVREKSGLKRYKNEAENVQNFEGIF |
| | | PKNIASDIRDKRITLLRIRFPFIETIVDPGRGKENPASKYGELSWLFQLV |
| | | NDMRNVFIHSTGSEEEIDYQHHKKIFNALRKVYDCGLRTVKSRFQLE |
| | | NDTTMPLLRCDNRGRPKPFNKFSLALCTSPERNGNKKQSDVLHDFG |
| | | RVLLCSLFLEKRQISGLVSHFWDKNGYGTDWNDSEQTIIRELLYVNRI |
| | | RLPSQRLRTDSTLTSVTLDTISELARCPRPLFELLDADGQENFRVGRS |
| | | PKNPQNRNDDPSYLLLRGHQSRFIPLAMRHLDFDSKCKLRFAVDLG |
| | | QYYHSVRLKPAESFIDGNPGIRRLGQKIIAFGRLKDFEDAEKPEIWKK |
| | | LEENGQKFAEEEEELLKRASITGSPEELKPYIIKTFPHYHLYRDKIGFCID |
| | | WEEKKDQKVKYPNLGVRGEDSKSTDSGGIKKRENRQLSRHQFWISP |
| | | NKIIDLAFYHYLQTEIKQEITASVKTGRKKCPYPSVENILKEYYEGMW |
| | | LIKELKEQGPLPPWTEIPQISERRAECHRWINKEIIKAENFTISLADLPK |
| | | AIRRHLKVLDSRETSVSDIIKRTKTMIEETCKKQKEIEYLLKYPKKRGKK |
| | | GFRPIKHGNIADFLTEDLLRFQPKDSSKKNGGKLTSKNYQILQKAIAY |
| | | YDKPYCIVDLLKKSGLLEGEFKHPFLCKIITEENHEQYSTLIDFYQKYLE |
| | | ERKAFLEGFIDTFVAGSSIPGWLRLRKPSTFESWLDQQLDEDEKLCQ |
| | | PLPVPKSLFYQMLLKMTAEKLDLTPEMLCKKGTQRFIRDSQEVEVKP |
| | | SVSWFIRQYMEHRDDTAQEMYMFKRRHELFDFFHDKKKTTKKLHE |
| | | EKTCCLSEKVRQEELESVHKGIEKLKKLLRTYKRSEKKIRHFSTMDMV |
| | | LYLLAKKNFEKLILCDETSGPDWSLKTLETKILSTKIKYELNVPGTDRTI |
| | | VHRACAIKKTGELRLLVRDRRLPSLLDYYPKTEKSIDQEEIKVELADYS |
| | | CKRIEAMKLISDLEQKIEESCNRGFCKPVPDKLKKIFGAKKHGTLLYAL |
| | | YHRFHEEKDKSVDEQGFNKDCFAHARQIRNAFAHNEYPVSEQFNQI |
| | | VRQVNETSQPHNHNSPVNHPKIADQLVKELDKLYKPWRNFLKRIAG |
| 202 | Cas13 | MGAIENKHIFAAYANLAIDGLIKTLNFIAKKLDTQKQLSSWDIKHVITL |
| | | IDSIFDQNPQNNLEQVVEGYLPWIKPIIEMKTPKKGERQSDKLCIEYK |
| | | TIITAFASLLNDVRNYYTHYYHDPICIYPRGYDIPSSLNCIYDSAINIIKE |
| | | RFQAEEKEMEHLRNYTLVNNNGLSEKGYAFFISKFLERKYSYLFLKKL |
| | | SGFKRGDSLQYRLTLEVFTALSTKPPVERLRTTKDTKQDRALDILNELS |
| | | RIPIELYQTLEPKYREMYNETLQPTDAEDPYGLPDRSRIRFRSRFEAFA |
| | | LHFLDKQADFKEIGFYTYLGNYFHNGYQKTRVDRETKDRYINFQLAG |
| | | FCKNIQDISAKKLSEALNVKSIDISTDSIPDINSFEPYLVQSTPHYIVNG |
| | | NNIGIKVLPEGKDTYPTIDEKGAKMPIADFWLSKYELPAMLFYTYLR |
| | | NNNIHKSHCPLSVKDIIERSIHKSTKQKHPEERSELMLRRVMKAIFWT |
| | | DSKLNEVERIKSQKSAFGKRQHEILKAGRIAETLVRDMLWLQPSKNN |
| | | GRDKVTEPNFQAIQVSLAYFGIRRNDLTEIFTRAGLINSSNPHPFLAQ |
| | | IGTNYTSLIEFYIAYLKERKVYFSRIQKKILQGKLNIQCHPLRDLQREPN |
| | | KPQEKEEAIFLPRGLFNEAIINCLKKSKLKHLIESPTREKSPALNVSYLIH |
| | | NYFRAYFEDQSQEFYAQPRNYRLFDKLSPNKGKSKSYLSLEQRIKKM |
| | | EELRPSKIPVAEANKLLEKEDRLYRKNYNEICDNESIIRLYQIQDILLFM |
| | | MTKEYLPSDLYNRINKYKLENVKGILNERVSYLIDLNPLKIQGEDIKIK |
| | | DYGKLFYIHHDTRISSLNKVLSKVKRNNSISSSVKIQPYENYKRECLDF |
| | | EEAQIQIIPIIHSFEIAMVSMFPDLKKATPGNYYDFNELITEYEKRTKQ |
| | | KIDSSFLIKTRNMFLHDKYEAECIKEISDDFVYAKKIIAEFKMKIENIKLE |
| | | DLSNDSSA |
| 203 | Cas13 | MGAIENKHIFAAYANLAIDGLIKTLNFIAKKLDTQKQLSSWDIKHVITL |
| | | IDSIFDQNPQNNLEQVVEGYLPWIKPIIEMKTPKKGERQSDKLCIEYK |
| | | TIITAFASLLNDVRNYYTHYYHDPICIYPRGYDIPSSLNCIYDSAINIIKE |
| | | RFQAEEKEMEHLRNYTLVNNNGLSEKGYAFFISKFLERKYSYLFLKKL |
| | | SGFKRGDSLQYRLTLEVFTALSTKPPVERLRTTKDTKQDRALDILNELS |
| | | RIPIELYQTLEPKYREMYNETLQPTDAEDPYGLPDRSRIRFRSRFEAFA |
| | | LHFLDKQADFKEIGFYTYLGNYFHNGYQKTRVDRETKDRYINFQLAG |
| | | FCKNIQDISAKKLSEALNVKSIDISTDSIPDINSFEPYLVQSTPHYIVNG |
| | | NNIGIKVLPEGKDTYPTIDEKGAKMPIADFWLSKYELPAMLFYTYLR |
| | | NNNIHKSHCPLSVKDIIERSIHKSTKQKHPEERSELMLRRVMKAIFWT |
| | | DSKLNEVERIKSQKSAFGKRQHEILKAGRIAETLVRDMLWLQPSKNN |
| | | GRDKVTEPNFQAIQVSLAYFGIRRNDLTEIFTRAGLINSSNPHPFLAQ |
| | | IGTNYTSLIEFYIAYLKERKVYFSRIQKKILQGKLNIQCHPLRDLQREPN |
| | | KPQEKEEAIFLPRGLFNEAIINCLKKSKLKHLIESPTREKSPALNVSYLIH |
| | | NYFRAYFEDQSQEFYAQPRNYRLFDKLSPNKGKSKSYLSLEQRIKKM |
| | | EELRPSKIPVAEANKLLEKEDRLYRKNYNEICDNESIIRLYQIQDILLFM |
| | | MTKEYLPSDLYNRINKYKLENVKGILNERVSYLIDLNPLKIQGEDIKIK |
| | | DYGKLFYIHHDTRISSLNKVLSKVKRNNSISSSVKIQPYENYKRECLDF |
| | | EEAQIQIIPIIHSFEIAMVSMFPDLKKATPGNYYDFNELITEYEKRTKQ |
| | | KIDSSFLIKTRNMFLHDKYEAECIKEISDDFVYAKKIIAEFKMKIENIKLE |
| | | DLSNDSSA |
| 204 | Cas13 | MGAIENKHIFAAYANLAIDGLIKTLNFIAKKLDTQKQLSSWDIKHVITL |
| | | IDSIFDQNPQNNLEQVVEGYLPWIKPIIEMKTPKKGERQSDKLCIEYK |
| | | TIITAFASLLNDVRNYYTHYYHDPICIYPGGYDIPSSLNCIYDSAINIIKE |
| | | RFQAEEKEMEHLRRYTRKKGRVVLKTEDDHFYYTLANNNDLSEKGY |
| | | AFFISMFLERKYSYLFLKKLSGFKRGDSLQYRLTLEVFTALSTKPPVERL |
| | | RTTKDTKQDRALDILNELSKIPIELYQTLEPKYREMYNETLQPTDAED |
| | | PYGLPDRSRIRFRSRFEAFALHFLDKQADFKEIGFYTYLGNYFHNGYQ |
| | | KTRVDRETKDRYINFQLAGFCKNIQDISAKKLSEALNVKSIDISTDSIP |
| | | DINSFEPYLVQSTPHYIVNGNNIGIKVLPEGKDTYPTIDEKGAKMPIA |
| | | DFWLSKYELPAMLFYTYLRNNNIHKSHCPLSVKDIIERSIHKSTKQKH |
| | | PEERSELMLRRVMKAIFWTDSKLNEVERIKSQKSAFGKRQHEILKAG |
| | | RIAETLVRDMLWLQPSKNNGRDKVTEPNFQAIQVSLAYFGIRRNDL |
| | | TEIFTRAGLINSSNPHPFLAQIGTNYTSLIEFYIAYLKERKVYFSRIQKKI |
| | | LQGKLNIQCHPLRDLQREPNKPQEKEEAIFLPRGLFNEAIINCLKKSKL |
| | | KHLIESPTREKSPALNVSYLIQNYFRAYFEDQSQEFYAQPRNYRLFDN |
| | | LSPNKGKSKSYLSLEQRIKKMEELRPSKIPVAEANKLLEKEDRLYRKNY |
| | | NEICDNESIIRLYQIQDILLFMMTKEYLPSDLYNRINKYKLENVKGILN |
| | | ERVSYLIDLNPLKIQGEDIKIKDYGKLFYIHHDTRISSLNKVLSKVKRNN |
| | | SISSSVKIQPYENYKRECLDFEEAQIQIIPIIHSFEIAMVSMFPDLKKAT |
| | | PGNYYDFNELITEYEKRTKQKIDSSFLIKTRNMFLHDKYEAECIKEISD |
| | | DFVYAKKIIAEFKMKIENIKLEDFSNDSSA |
| 205 | Cas13 | MGAIENKHIFAAYANLAIDGLIKTLNFIAKKLDTQKQLSSWDIKHVITL |
| | | IDSIFDQNPQNNLEQVVEGYLPWIKPIIEMKTPKKGERQSDKLCIEYK |
| | | TIITAFASLLNDVRNYYTHYYHDPICIYPRGYDIPSSLNCIYDSAINIIKE |
| | | RFQAEEKEMEHLRNYTLVNNNGLSEKGYAFFISKFLERKYSYLFLKKL |
| | | SGFKRGDSLQYRLTLEVFTALSTKPPVERLRTTKDTKQDRALDILNELS |
| | | RIPIELYQTLEPKYREMYNETLQPTDAEDPYGLPDRSRIRFRSRFEAFA |
| | | LHFLDKQADFKEIGFYTYLGNYFHNGYQKTRVDRETKDRYINFQLAG |
| | | FCKNIQDISAKKLSEALNVKSIDISTDSIPDINSFEPYLVQSTPHYIVNG |
| | | NNIGIKVLPEGKDTYPTIDEKGAKMPIADFWLSKYELPAMLFYTYLR |
| | | NNNIHKSHCPLSVKDIIERSIHKSTKQKHPEERSELMLRRVMKAIFWT |
| | | DSKLNEVERIKSQKSAFGKRQHEILKAGRIAETLVRDMLWLQPSKNN |
| | | GRDKVTEPNFQAIQVSLAYFGIRRNDLTEIFTRAGLINSSNPHPFLAQ |
| | | IGTNYTSLIEFYIAYLKERKVYFSRIQKKILQGKLNIQCHPLRDLQREPN |
| | | KPQEKEEAIFLPRGLFNEAIINCLKKSKLKHLIESPTREKSPALNVSYLIH |
| | | NYFRAYFEDQSQEFYAQPRNYRLFDKLSPNKGKSKSYLSLEQRIKKM |
| | | EELRPSKIPVAEANKLLEKEDRLYRKNYNEICDNESIIRLYQIQDILLFM |
| | | MTKEYLPSDLYNRINKYKLENVKGILNERVSYLIDLNPLKIQGEDIKIK |
| | | DYGKLFYIHHDTRISSLNKVLSKVKRNNSISSSVKIQPYENYKRECLDF |
| | | EEAQIQIIPIIHSFEIAMVSMFPDLKKATPGNYYDFNELITEYEKRTKQ |
| | | KIDSSFLIKTRNMFLHDKYEAECIKEISDDFVYAKKIIAEFKMKIENIKLE |
| | | DLSNDSSA |
| 206 | Cas13 | MGAIKNKHIFAAYANLAIDGLIKTLNFIAKKLDTQKQLSSWDIKHVIT |
| | | LIDSIFDQNPQNNLEQVVEGYLPWIKPIIEMKTPKKGERQSDKLCIEY |
| | | KTIITAFASLLNDVRNYYTHYYHDPICIYPGGYDIPSSLNCIYDSAINIIK |
| | | ERFQAEEKEMEHLRRYTRKKGRVVLKTEDDHFYYTLANNNDLSEKG |
| | | YAFFISMFLERKYSYLFLKKLSGFKRGDSLQYRLTLEVFTALSTKPPVER |
| | | LRTTKDTKQDRALDILNELSKIPIELYQTLEPKYREMYNETLQPTDAE |
| | | DPYGLPDRSRIRFRSRFEAFALHFLDKQADFKEIGFYTYLGNYFHNGY |
| | | QKTRVDRETKDRYINFQLAGFCKNIQDISAKKLSEALNVKSIDISTDSI |
| | | PDINSFEPYLVQSTPHYIVNGNNIGIKVLPEGKDTYPTIDEKGAKMPI |
| | | ADFWLSKYELPAMLFYTYLRNNNIHKSHCPLSVKDIIERSIHKSTKQK |
| | | HPEERSELMLRRVMKAIFWTDSKLNEVERIKSQKSAFGKRQHEILKA |
| | | GRIAETLVRDMLWLQPSKNNGRDKVTEPNFQAIQVSLAYFGIRRND |
| | | LTEIFTRAGLINSSNPHPFLAQIGTNYTSLIEFYIAYLKERKVYFSRIQKK |
| | | ILQGKLNIQCHPLRDLQREPNKPQDKEEAIFLPRGLFNEAIINCLKKSK |
| | | LKQLIESPTREKSPALNVSYLIQNYFRTYFEDQSQEFYAQPRNYRLFD |
| | | KLSPNKGKSKSYLSLEQRIKKMEELRPSKIPVAEANKLLEKEDRLYRKN |
| | | YNEICDNESIIRLYQIQDILLFMMTKEYLPSDLYNRINKYKLENVKGIL |
| | | NERVSYLIDLNPLKIQGEDIKIKDYGKLFYIHHDTRISSLNKVLSKVKRN |
| | | NSISSSVKIQPYENYKRECLDFEEAQIQIIPIIHSFEIAMVSMFPDLKKA |
| | | TPGNYYDFNELITEYEKRTKQKIGSSFLIKTRNMFLHDKYEAECIKEIS |
| | | DDFVYAKKIIAEFKMKIENIKLEDLSNDSSA |
| 207 | Cas13 | MGAIENKHIFAAYANLAIDGLIKTLNFIAKKLDTQKQLSSWDIKHVITL |
| | | IDSIFDQNPQNNLEQVVEGYLPWIKPIIEMKTPKKGERQSDKLCIEYK |
| | | TIITAFASLLNDVRNYYTHYYHDPICIYPGGYDIPSSLNCIYDSAINIIKE |
| | | RFQAEEKEMEHLRRYTRKKGRVVLKTEDDHFYYTLANNNDLSKKGY |
| | | AFFISMFLERKYSYLFLKKLSGFKRGDSLQYRLTLEVFTALSTKPPVERL |
| | | RTTKDTKQDRALDILNELSRIPIELYQTLEPKYREMYNETLQPTDAED |
| | | PYGLPDRSRIRFRSRFEAFALHFLDKQADFKEIGFYTYLGNYFHNGYQ |
| | | KTRVDRETKDRYINFQLAGFCKNIQDISAKKLSEALNVKSIDISTDSIP |
| | | DINSFEPYLVQSTPHYIVNGNNIGIKVLPEGKDTYPTIDEKGAKMPIA |
| | | DFWLSKYELPAMLFYTYLRNNNIHKSHCPLSVKDIIERSIHKSTKOKH |
| | | PEERSELMLRRVMKAIFWTDSKLNEVERIKSQKSAFGKRQHEILKAG |
| | | RIAETLVRDMLWLQPSKNNGRDKVTEPNFQAIQVSLAYFGIRRNDL |
| | | TEIFTRAGLINSSNPHPFLAQIGTNYTSLIEFYIAYLKERKVYFSRIQKKI |
| | | LQGKLNIQCHPLRDLQREPNKPQEKEEAIFLPRGLFNEAIINCLKKSKL |
| | | KQLIESPTREKSPALNVSYLILNYFRTYFEDQSQEFYAQPRNYRLFDKL |
| | | SPNKGKSKSYLSLEQRIKKMEELRPSKIPVAEANKLLEKEDRLYRKNY |
| | | NEICDNESIIRLYQIQDILLFMMTKEYLPSDLYNRINKYKLENVKGILN |
| | | ERVSYLIDLNPLKIQGEDIKIKDYGKLFYIHHDTRINSLNKVLSKVKRN |
| | | NSISSSVKIQPYENYKRECLDFEEAQIQIIPIIHSFEIAMVSMFPDLKKA |
| | | TPGNYYDFNELITEYEKRTKQKIDSSFLIKTRNMFLHDKYEAECIKEIS |
| | | DDFVYAKKIIAEFKMKIENIKLEDFSNDSSA |
| 208 | Cas13 | MGAIENKHIFAAYANLAIDGLIKTLNFIAKKLDTQKQLSSWDIKHVITL |
| | | IDSIFDQNPQNNLEQVVEGYLPWIKPIIEMKTPKKGERQSDKLCIEYK |
| | | TIITAFASLLNDVRNYYTHYYHDPICIYPGGYDIPSSLNCIYDSAINIIKE |
| | | RFQAEEKEMKHLRNYTLVNNNGLSEKGYAFFISKFLERKYSYLFLKKL |
| | | SGFKRGDSLQYRLTLEVFTALSTKPPVERLRTTKDTKQDRALDILNELS |
| | | KIPIELYQTLEPKYREMYNETLOPTDAEDPYGLPDRSRIRFRSRFEAFA |
| | | LHFLDKQADFKEIGFYTYLGNYFHNGYQKTRVDRETKDRYINFQLAG |
| | | FCKNIQDISAKKLSEALNVKSIDISTDSIPDINSFEPYLVQSTPHYIVNG |
| | | NNIGIKVLPEGKDTYPTIDEKGAKMPIADFWLSKYELPAMLFYTYLR |
| | | NNNIHKSHCPLSVKDIIERSIHKSTKQKHPEERSELMLRRVMKAIFWT |
| | | DSKLNEVERIKSQKSAFGKRQHEILKAGRIAETLVRDMLWLQPSKNN |
| | | GRDKVTEPNFQAIQVSLAYFGIRRNDLTEIFTRAGLINSSNPHPFLAQ |
| | | IGTNYTSLIEFYIAYLKERKVYFSRIQKKILQGKLNIQCHPLRDLQREPN |
| | | KPQEKEEAIFLPRGLFNEAIINCLKKSKLKQLIESPTREKSPALNVSYLIQ |
| | | NYFRTYFEDQSQEFYAQPRNYRLFDKLSPNKGKSKSYLSLEQRIKKM |
| | | EELRPSKIPVAEANKLLEKEDRLYRKNYNEICDNESIIRLYQIQDILLFM |
| | | MTKEYLPSDLYNRINKYKLENVKGILNERVSYLIDLNPLKIQGEDIKIK |
| | | DYGKLFYIHHDTRINSLNKVLSKVKRNNSISSSVKIQPYENYKRECLDF |
| | | EEAQIQIIPIIHSFEIAMVSMFPDLKKATPGNYYDFNELITEYEKRTKQ |
| | | KIDSSFLIKTRNMFLHDKYEAECIKEISDDLVYAKKIIAEFKMKIENIKLE |
| | | DLSNDSSA |
| 209 | Cas13 | MGAIKNKHIFAAYANLAIDGLIKTLNFIAKKLDTQKQLSSWDIKHVIT |
| | | LIDSIFDQNPQNNLEQVVEGYLPWIKPIIEMKTPKKGERQSDKLCIEY |
| | | KTIITAFASLLNDVRNYYTHYYHDPICIYPGGYDIPSSLNCIYDSAINIIK |
| | | ERFQAEEKEMEHLRRYTRKKGRVVLKTEDDHFYYTLANNNDLSEKG |
| | | YAFFISMFLERKYSYLFLKKLSGFKRGDSLQYRLTLEVFTALSTKPPVER |
| | | LRTTKDTKQDRALDILNELSKIPIELYQTLEPKYREMYNETLQPTDAE |
| | | DPYGLPDRSRIRFRSRFEAFALHFLDKQADFKEIGFYTYLGNYFHNGY |
| | | QKTRVDRETKDRYINFQLAGFCKNIQDISAKKLSEALNVKSIDISTDSI |
| | | PDINSFEPYLVQSTPHYIVNGNNIGIKVLPEGKDTYPTIDEKGAKMPI |
| | | ADFWLSKYELPAMLFYTYLRNNNIHKSHCPLSVKDIIERSIHKSTKOK |
| | | HPEERSELMLRRVMKAIFWTDSKLNEVERIKSQKSAFGKRQHEILKA |
| | | GRIAETLVRDMLWLQPSKNNGRDKVTEPNFQAIQVSLAYFGIRRND |
| | | LTEIFTRAGLINSSNPHPFLAQIGTNYTSLIEFYIAYLKERKVYFSRIQKK |
| | | ILQGKLNIQCHPLRDLQREPNKPQDKEEAIFLPRGLFNEAIINCLKKSK |
| | | LKQLIESPTREKSPALNVSYLIQNYFRTYFEDQSQEFYAQPRNYRLFD |
| | | KLSPNKGKSKSYLSLEQRIKKMEELRPSKIPVAEANKLLEKEDRLYRKN |
| | | YNEICDNESIIRLYQIQDILLFMMTKEYLPSDLYNRINKYKLENVKGIL |
| | | NERVSYLIDLNPLKIQGEDIKIKDYGKLFYIHHDTRISSLNKVLSKVKRN |
| | | NSISSSVKIQPYENYKRECLDFEEAQIQIIPIIHSFEIAMVSMFPDLKKA |
| | | TPGNYYDFNELITEYEKRTKQKIGSSFLIKTRNMFLHDKYEAECIKEIS |
| | | DDFVYAKKIIAEFKMKIENIKLEDLSNDSSA |
| 210 | Cas13 | MGAIENKHIFAAYANLAIDGLIKTLNFIAKKLDTOKQLSSWDIKHVITL |
| | | IDSIFDQNPQNNLEQVVEGYLPWIKPIIEMKTPKKGERQSDKLCIEYK |
| | | TIITAFASLLNDVRNYYTHYYHDPICIYPGGYDIPSSLNCIYDSAINIIKE |
| | | RFQAEEKEMEHLRRYTRKKGRVVLKTEDDHFYYTLANNNDLSEKGY |
| | | AFFISMFLERKYSYLFLKKLSGFKRGDSLQYRLTLEVFTALSTKPPVERL |
| | | RTTKDTKQDRALDILNELSRIPIELYQTLEPKYREMYNETLQPTDAED |
| | | PYGLPDRSRIRFRSRFEAFALHFLDKQADFKEIGFYTYLGNYFHNGYQ |
| | | KTRVDRETKDRYINFQLAGFCKNIQDISAKKLSEALNVKSIDISTDSIP |
| | | DINSFEPYLVQSTPHYIVNGNNIGIKVLPEGKDTYPTIDEKGAKMPIA |
| | | DFWLSKYELPAMLFYTYLRNNNIHKSHCPLSVKDIIERSIHKSTKOKH |
| | | PEERSELMLRRVMKAIFWTDSKLNEVERIKSQKSAFGKRQHEILKAG |
| | | RIAETLVRDMLWLQPSKNNGRDKVTEPNFQAIQVSLAYFGIRRNDL |
| | | TEIFTRAGLINSSNPHPFLAQIGTNYTSLIEFYIAYLKERKVYFSRIOKKI |
| | | LQGKLNIQCHPLRDLQREPNKPQEKEEAIFLPRGLFNEAIINCLKKSKL |
| | | KQLIESPTREKSPALNVSYLILNYFRTYFEDQSQEFYAQPRNYRLFDKL |
| | | SPNKGKSKSYLSLEQRIKKMEELRPSKIPVAEANKLLEKEDRLYRKNY |
| | | NEICDNESIIRLYOIQDILLFMMTKEYLPSDLYNRINKYKLENVKGILN |
| | | ERVSYLIDLNPLKIQGEDIKIKDYGKLFYIHHDTRINSLNKVLSKVKRN |
| | | NSISSSVKIQPYENYKRECLDFEEAQIQIIPIIHSFEIAMVSMFPDLKKA |
| | | TPGNYYDFNELITEYEKRTKQKIDSSFLIKTRNMFLHDKYEAECIKEIS |
| | | DDFVYAKKIIAEFKMKIENIKLEDFSNDSSA |
| 211 | Cas13 | MGAIENKHIFAAYANLAIDGLIKTLNFIAKKLDTQKQLSSWDIKHVITL |
| | | IDSIFDQNPQNNLEQVVEGYLPWIKPIIEMKTPKKGERQSDKLCIEYK |
| | | TIITAFASLLNDVRNYYTHYYHDPICIYPGGYDIPSSLNCIYDSAINIIKE |
| | | RFQAEEKEMEHLRRYTRKKGRVVLKTEDDHFYYTLANNNDLSEKGY |
| | | AFFISMFLERKYSYLFLKKLSGFKRGDSLQYRLTLEVFTALSTKPPVERL |
| | | RTTKDTKQDRALDILNELSKIPIELYQTLEPKYREMYNETLQPTDAED |
| | | PYGLPDRSRIRFRSRFEAFALHFLDKQADFKEIGFYTYLGNYFHNGYO |
| | | KTRVDRETKDRYINFQLAGFCKNIQDISAKKLSEALNVKSIDISTDSIP |
| | | DINSFEPYLVQSTPHYIVNGNNIGIKVLPEGKDTYPTIDEKGAKMPIA |
| | | DFWLSKYELPAMLFYTYLRNNNIHKSHCPLSVKDIIERSIHKSTKOKH |
| | | PEERSELMLRRVMKAIFWTDSKLNEVERIKSQKSAFGKRQHEILKAG |
| | | RIAETLVRDMLWLQPSKNNGRDKVTEPNFQAIQVSLAYFGIRRNDL |
| | | TEIFTRAGLINSSNPHPFLAQIGTNYTSLIEFYIAYLKERKVYFSRIOKKI |
| | | LQGKLNIQCHPLRDLQREPNKPQEKEEAIFLPRGLFNEAIINCLKKSKL |
| | | KHLIESPTREKSPALNVSYLIQNYFRAYFEDQSQEFYAQPRNYRLFDN |
| | | LSPNKGKSKSYLSLEQRIKKMEELRPSKIPVAEANKLLEKEDRLYRKNY |
| | | NEICDNESIIRLYQIQDILLFMMTKEYLPSDLYNRINKYKLENVKGILN |
| | | ERVSYLIDLNPLKIQGEDIKIKDYGKLFYIHHDTRISSLNKVLSKVKRNN |
| | | SISSSVKIQPYENYKRECLDFEEAQIQIIPIIHSFEIAMVSMFPDLKKAT |
| | | PGNYYDFNELITEYEKRTKQKIDSSFLIKTRNMFLHDKYEAECIKEISD |
| | | DFVYAKKIIAEFKMKIENIKLEDFSNDSSA |
| 212 | Cas13 | MGAIENKHIFAAYANLAIDGLIKTLNFIAKKLDTQKQLSSWDIKHVITL |
| | | IDSIFDQNPQNNLEQVVEGYLPWIKPIIEMKTPKKGERQSDKLCIEYK |
| | | TIITAFASLLNDVRNYYTHYYHDPICIYPRGYDIPSSLNCIYDSAINIIKE |
| | | RFQAEEKEMEHLRNYTLVNNNGLSEKGYAFFISKFLERKYSYLFLKKL |
| | | SGFKRGDSLQYRLTLEVFTALSTKPPVERLRTTKDTKQDRALDILNELS |
| | | RIPIELYQTLEPKYREMYNETLOPTDAEDPYGLPDRSRIRFRSRFEAFA |
| | | LHFLDKQADFKEIGFYTYLGNYFHNGYQKTRVDRETKDRYINFQLAG |
| | | FCKNIQDISAKKLSEALNVKSIDISTDSIPDINSFEPYLVQSTPHYIVNG |
| | | NNIGIKVLPEGKDTYPTIDEKGAKMPIADFWLSKYELPAMLFYTYLR |
| | | NNNIHKSHCPLSVKDIIERSIHKSTKQKHPEERSELMLRRVMKAIFWT |
| | | DSKLNEVERIKSQKSAFGKRQHEILKAGRIAETLVRDMLWLQPSKNN |
| | | GRDKVTEPNFQAIQVSLAYFGIRRNDLTEIFTRAGLINSSNPHPFLAQ |
| | | IGTNYTSLIEFYIAYLKERKVYFSRIQKKILQGKLNIQCHPLRDLQREPN |
| | | KPQEKEEAIFLPRGLFNEAIINCLKKSKLKHLIESPTREKSPALNVSYLIH |
| | | NYFRAYFEDQSQEFYAQPRNYRLFDKLSPNKGKSKSYLSLEQRIKKM |
| | | EELRPSKIPVAEANKLLEKEDRLYRKNYNEICDNESIIRLYQIQDILLFM |
| | | MTKEYLPSDLYNRINKYKLENVKGILNERVSYLIDLNPLKIQGEDIKIK |
| | | DYGKLFYIHHDTRISSLNKVLSKVKRNNSISSSVKIQPYENYKRECLDF |
| | | EEAQIQIIPIIHSFEIAMVSMFPDLKKATPGNYYDFNELITEYEKRTKQ |
| | | KIDSSFLIKTRNMFLHDKYEAECIKEISDDFVYAKKIIAEFKMKIENIKLE |
| | | DLSNDSSA |
| 213 | Cas13 | MGAIENKHIFAAYANLAIDGLIKTLNFIAKKLDTQKQLSSWDIKHVITL |
| | | IDSIFDQNPQNNLEQVVEGYLPWIKPIIEMKTPKKGERQSDKLCIEYK |
| | | TIITAFASLLNDVRNYYTHYYHDPICIYPGGYDIPSSLNCIYDSAINIIKE |
| | | RFQAEEKEMEHLRRYTRKKGRVVLKTEDDHFYYTLANNNDLSEKGY |
| | | AFFISMFLERKYSYLFLKKLSGFKRGDSLQYRLTLEVFTALSTKPPVERL |
| | | RTTKDTKQDRALDILNELSRIPIELYQTLEPKYREMYNATLQPTDAED |
| | | PYGLPDRSRIRFRSRFEAFALHFLDKQADFKEIGFYTYLGNYFHNGYQ |
| | | KTRVDRETKDRYINFQLAGFCKNIQDISAKKLSEALNVKSIDISTDSIP |
| | | DINSFEPYLVQSTPHYIVNGNNIGIKVLPEGKDTYPTIDEKGAKMPIA |
| | | DFWLSKYELPAMLFYTYLRNNNIHKSHCPLSVKDIIERSIHKSTKQKH |
| | | PEERSELMLRRVMKAIFWTDSKLNEVERIKSQKSAFGKRQHEILKAG |
| | | RIAETLVRDMLWLQPSKNNGRDKVTEPNFQAIQVSLAYFGIRRNDL |
| | | TEIFTRAGLINSSNPHPFLAQIGTNYTSLIEFYIAYLKERKVYFSRIQKKI |
| | | LQGKLNIQCHPLRDLQREPNKPQEKEEAIFLPRGLFNEAIINCLKKSKL |
| | | KQLIESPTREKSPALNVSYLILNYFRTYFEDQSQEFYAQPRNYRLFDKL |
| | | SPNKGKSKSYLSLEQRIKKMEELRPSKIPVAEANKLLEKEDRLYRKNY |
| | | NEICDNESIIRLYQIQDILLFMMTKEYLPSDLYNRINKYKLENVKGILN |
| | | ERVSYLIDLNPLKIQGEDIKIKDYGKLFYIHHDTRINSLNKVLSKVKRN |
| | | NSISSSVKIQPYENYKRECLDFEEAQIQIIPIIHSFEIAMVSMFPDLKKA |
| | | TPGNYYDFNELITEYEKRTKQKIDSSFLIKTRNMFLHDKYEAECIKEIS |
| | | DDFVYAKKIIAEFKMKIENIKLEDFSNDSSA |
| 214 | Cas13 | MGAIENKHIFAAYANLAIDGLIKTLNFIAKKLDTQKQLSSWDIKHVITL |
| | | IDSIFDQNPQNNLEQVVEGYLPWIKPIIEMKTPKKGERQSDKLCIEYK |
| | | TIITAFASLLNDVRNYYTHYYHDPICIYPGGYDIPSSLNCIYDSAINIIKE |
| | | RFQAEEKEMEHLRRYTRKKGRVVLKTEDDHFYYTLANNNDLSEKGY |
| | | AFFISMFLERKYSYLFLKKLSGFKRGDSLQYRLTLEVFTALSTKPPVERL |
| | | RTTKDTKQDRALDILNELSKIPIELYQTLEPKYREMYNETLQPTDAED |
| | | PYGLPDRSRIRFRSRFETFALHFLDKQPDFKEIGFYTYLGNYFHNGYQ |
| | | KTRVDRETKDRYINFQLAGFCKNIQDISAKKLSEALNVKSIDISTDSIP |
| | | DINSFEPYLVQSMPHYIVNGNNIGIKVLPEGKDTYPTIDEKGAKMPI |
| | | ADFWLSKYELPAMLFYTYLRNNNIHKSHCPLSVKDIIERSIHKSTKQK |
| | | HPEERSELMLRRVMKAIFWTDSKLNEVERIKSQKSAFGKRQHEILKA |
| | | GRIAEMLVRDMLWLQPSKNNGRDKVTEPNFQAIQVSLAYFGIRRN |
| | | DLTEIFTRAGLINSSNPHPFLAQIGTNYTSLIEFYIAYLKERKVYFSRIQK |
| | | KILQGKLNIQCHPLRDLQREPNKPQEKEEAIFLPRGLFNEAIINCLKKS |
| | | KLKQLIESPTREKSPALNVSYLIQNYFRAYFEDQSQEFYAQPRNYRLF |
| | | DKLSPNKGKSKSYLSLEQRIKKMEELRPSKIPVAEANKLLEKEDRLYRK |
| | | NYNEICDNESIIRLYQIQDILLFMMTKEYLPSDLYNRINKYKLENVKGI |
| | | LNERVSYLIDLNPLKIQGEDIKIKDYGKLFYIHHDTRISSLNKVLSKVKR |
| | | NNSISSSVKIQPYENYKRECLDFEEAQIQIIPIIHSFEIAMVSMFPDLKK |
| | | ATPGNYYDFNELITEYEKRTKOKIDSSFLIKTRNMFLHDKYEAECIKEIS |
| | | DDFVYAKKIIAEFKMKIENIKLEDLSNDSSA |
| 215 | Cas13 | MGAIKNKHIFAAYANLAIDGLIKTLNFIAKKLDTQKQLSSWDIKHVIT |
| | | LIDSIFDQNPQNNLEQVVEGYLPWIKPIIEMKTPKKGERQSDKLCIEY |
| | | KTIITAFASLLNDVRNYYTHYYHDPICIYPGGYDIPSSLNCIYDSAINIIK |
| | | ERFQAEEKEMEHLRRYTRKKGRVVLKTEDDHFYYTLANNNDLSEKG |
| | | YAFFISMFLERKYSYLFLKKLSGFKRGDSLQYRLTLEVFTALSTKPPVER |
| | | LRTTKDTKQDRALDILNELSKIPIELYQTLEPKYREMYNETLQPTDAE |
| | | DPYGLPDRSRIRFRSRFEAFALHFLDKQADFKEIGFYTYLGNYFHNGY |
| | | QKTRVDRETKDRYINFQLAGFCKNIQDISAKKLSEALNVKSIDISTDSI |
| | | PDINSFEPYLVQSTPHYIVNGNNIGIKVLPEGKDTYPTIDEKGAKMPI |
| | | ADFWLSKYELPAMLFYTYLRNNNIHKSHCPLSVKDIIERSIHKSTKQK |
| | | HPEERSELMLRRVMKAIFWTDSKLNEVERIKSQKSAFGKRQHEILKA |
| | | GRIAETLVRDMLWLQPSKNNGRDKVTEPNFQAIQVSLAYFGIRRND |
| | | LTEIFTRAGLINSSNPHPFLAQIGTNYTSLIEFYIAYLKERKVYFSRIQKK |
| | | ILQGKLNIQCHPLRDLQREPNKPQDKEEAIFLPRGLFNEAIINCLKKSK |
| | | LKQLIESPTREKSPALNVSYLIQNYFRTYFEDQSQEFYAQPRNYRLFD |
| | | KLSPNKGKSKSYLSLEQRIKKMEELRPSKIPVAEANKLLEKEDRLYRKN |
| | | YNEICDNESIIRLYQIQDILLFMMTKEYLPSDLYNRINKYKLENVKGIL |
| | | NERVSYLIDLNPLKIQGEDIKIKDYGKLFYIHHDTRISSLNKVLSKVKRN |
| | | NSISSSVKIQPYENYKRECLDFEEAQIQIIPIIHSFEIAMVSMFPDLKKA |
| | | TPGNYYDFNELITEYEKRTKQKIGSSFLIKTRNMFLHDKYEAECIKEIS |
| | | DDFVYAKKIIAEFKMKIENIKLEDLSNDSSA |
| 216 | Cas13 | MGKLYGYKRWYEIEQNNGEKGSFKRKIRVKRVYDEESKSYVVRRDE |
| | | VEDTELIKNKNFIINLKDYKTRNSNIQKFYDKFHVGNILFKLKASVKKG |
| | | KKTFYKDLEKAETVLTNVEILEQ.TIKLANNSKINRKKLEKELTQLNINEK |
| | | SEEVTIDNIKIYLRQGEKFDKKENINAIKWRKLTSEELTIKVEIYRECQSI |
| | | NSNLYSLLDYVLSNEEYDDRYYLEEVENKLLIFGTGNKNKNGRNYYYF |
| | | DYVLKSLSKIKGLIKKDDRNLNYLMFLFNIQKTSENKEHFINKIFNYFK |
| | | YEVRIEKEDIVEFLVGELEYYDLIKRIEKKPSENQNQTNLEKTYILLDKH |
| | | EKLKETIDTKNEIVQKLTIELKNNNLRNRIEIILHKYKILELVDKLNKNIK |
| | | NGKINTELYGIYKEHYGQCIEYINFNELALEEKELYKIIYRYLKGRIEKLL |
| | | QNRNKIKIGELRIEDIFIFQKLLEKIEIRVKQYLLEHILYLGKLKHHNIDE |
| | | VNTIRFVEEHANEELSLELITLFSATNVELNRLLKVKGENGSYEKDYDF |
| | | FSAKPDKGKIKIKDTNSVMKFELLKKLKFINSEATETNQEAIDFLKEAY |
| | | NLRNNILHGKNEEIIEDNKKNLSKSYKNINELIEELRPSDNEICKSLNLD |
| | | IIFKGNRKINDINAKLFGNNREKIYLPSFSKLVPEIKNIIESYDKNGTFN |
| | | DERIKKIVLNGAIYVNKILYLKECSNKDGEFIKNLKEELNKDSKEKSKYV |
| | | SIEELYKKSQISASKGNKKAIYKYQRKIIEIYLKYLKENYVEILDFSKLNLN |
| | | IEQIENDIKNRKNSENKVLIESIKQKVFPENDFEYIISIFALLNDNIFINKI |
| | | RNRFFSTDTWLKNNRYSNIIKILDEVISVNLLRTELLNTSIDIEEIKDDV |
| | | LTEDIENIIPEIREEILQRTKKDFKTLLGNNAISKEGLSNEDIDKIRNIED |
| | | AKINLDFVNNEIKVSLKEYGSLPPNGVLSRNTSKYYNNEIAKKIDQISIL |
| | | TFTKKSIGTISDEKFRNIYWQERKESDESKKIFVYNKNILYLVTKHSFEK |
| | | LYKNFLEEELNNLKLEDTKYLRDLDLRREKNLKVDNTLKEINEKVRGY |
| | | SKEYKKKFIENLKNNDEYFGKVVSGRFKNYQEFKEIYDEVSEYKKIRD |
| | | VVNFNPLNKVYNYLIEINWKLAIQMARAERDLHYIVNGLNELKLIEL |
| | | NQGQNDGISRAYPKYKLNKEKNKKELRLEECHYNFDIDNYKKFEKIC |
| | | EKLGIDLSENGELQQENETNIRNYISHFYILRKPFVDISISEAIKRVSKLL |
| | | SYRTRYNNSTYSSVFEVFKKDVELNYDFLKKKIELNGKTYDEVVQRKK |
| | | ISCLELESYLDYKPIIKKILF |
| 217 | Cas13 | MGAIENKHIFAAYANLAIDGLIKTLNFIAKKLDTQKQLSSWDIKHVITL |
| | | IDSIFDQNPQNNLEQVVEGYLPWIKPIIEMKTPKKGERQSDKLCIEYK |
| | | TIITAFASLLNDVRNYYTHYYHDPICIYPGGYDIPSSLNCIYDSAINIIKE |
| | | RFQAEEKEMEHLRRYTRKKGRVVLKTEDDHFYYTLANNNDLSEKGY |
| | | AFFISMFLERKYSYLFLKKLSGFKRGDSLQYRLTLEVFTALSTKPPVERL |
| | | RTTKDTKQDRALDILNELSKIPIELYQTLEPKYREMYNETLQPTDAED |
| | | PYGLPDRSRIRFRSRFEAFALHFLDKQADFKEIGFYTYLGNYFHNGYQ |
| | | KTRVDRETKDRYINFQLAGFCKNIQDISAKKLSEALNVKSIDISTDSIP |
| | | DINSFEPYLVQSTPHYIVNGNNIGIKVLPEGKDTYPTIDEKGAKMPIA |
| | | DFWLSKYELPAMLFYTYLRNNNIHKSHCPLSVKDIIERSIHKSTKQKH |
| | | PEERSELMLRRVMKAIFWTDSKLNEVERIKSQKSAFGKRQHEILKAG |
| | | RIAETLVRDMLWLQPSKNNGRDKVTEPNFQAIQVSLAYFGIRRNDL |
| | | TEIFTRAGLINSSNPHPFLAQIGTNYTSLIEFYIAYLKERKVYFSRIQKKI |
| | | LQGKLNIQCHPLRDLQREPNKPQEKEEAIFLPRGLFNEAIINCLKKSKL |
| | | KHLIESPTREKSPALNVSYLIQNYFRAYFEDQSQEFYAQPRNYRLFDN |
| | | LSPNKGKSKSYLSLEQRIKKMEELRPSKIPVAEANKLLEKEDRLYRKNY |
| | | NEICDNESIIRLYQIQDILLFMMTKEYLPSDLYNRINKYKLENVKGILN |
| | | ERVSYLIDLNPLKIQGEDIKIKDYGKLFYIHHDTRISSLNKVLSKVKRNN |
| | | SISSSVKIQPYENYKRECLDFEEAQIQIIPIIHSFEIAMVSMFPDLKKAT |
| | | PGNYYDFNELITEYEKRTKQKIDSSFLIKTRNMFLHDKYEAECIKEISD |
| | | DFVYAKKIIAEFKMKIENIKLEDFSNDSSA |
| 218 | Cas13 | MGAIKNKHIFAAYANLAIDGLIKTLNFIAKKLDTQKQLSSWDIKHVIT |
| | | LIDSIFDQNPQNNLEQVVEGYLPWIKPIIEMKTPKKGERQSDKLCIEY |
| | | KTIITAFASLLNDVRNYYTHYYHDPICIYPGGYDIPSSLNCIYDSAINIIK |
| | | ERFQAEEKEMEHLRRYTRKKGRVVLKTEDDHFYYTLANNNDLSEKG |
| | | YAFFISMFLERKYSYLFLKKLSGFKRGDSLQYRLTLEVFTALSTKPPVER |
| | | LRTTKDTKQDRALDILNELSKIPIELYQTLEPKYREMYNETLQPTDAE |
| | | DPYGLPDRSRIRFRSRFEAFALHFLDKQADFKEIGFYTYLGNYFHNGY |
| | | QKTRVDRETKDRYINFQLAGFCKNIQDISAKKLSEALNVKSIDISTDSI |
| | | PDINSFEPYLVQSTPHYIVNGNNIGIKVLPEGKDTYPTIDEKGAKMPI |
| | | ADFWLSKYELPAMLFYTYLRNNNIHKSHCPLSVKDIIERSIHKSTKQK |
| | | HPEERSELMLRRVMKAIFWTDSKLNEVERIKSQKSAFGKRQHEILKA |
| | | GRIAETLVRDMLWLQPSKNNGRDKVTEPNFQAIQVSLAYFGIRRND |
| | | LTEIFTRAGLINSSNPHPFLAQIGTNYTSLIEFYIAYLKERKVYFSRIQKK |
| | | ILQGKLNIQCHPLRDLQREPNKPQDKEEAIFLPRGLFNEAIINCLKKSK |
| | | LKQLIESPTREKSPALNVSYLIQNYFRTYFEDQSQEFYAQPRNYRLFD |
| | | KLSPNKGKSKSYLSLEQRIKKMEELRPSKIPVAEANKLLEKEDRLYRKN |
| | | YNEICDNESIIRLYQIQDILLFMMTKEYLPSDLYNRINKYKLENVKGIL |
| | | NERVSYLIDLNPLKIQGEDIKIKDYGKLFYIHHDTRISSLNKVLSKVKRN |
| | | NSISSSVKIQPYENYKRECLDFEEAQIQIIPIIHSFEIAMVSMFPDLKKA |
| | | TPGNYYDFNELITEYEKRTKQKIGSSFLIKTRNMFLHDKYEAECIKEIS |
| | | DDFVYAKKIIAEFKMKIENIKLEDLSNDSSA |
| 219 | Cas13 | MGAIKNKHIFAAYANLAIDGLIKTLNFIAKKLDTQKQLSSWDIKHVIT |
| | | LIDSIFDQNPQNNLEQVVEGYLPWIKPIIEMKTPKKGERQSDKLCIEY |
| | | KTHTAFASLLNDVRNYYTHYYHDPICIYPGGYDIPSSLNCIYDSAINIIK |
| | | ERFQAEEKEMEHLRRYTRKKGRVVLKTEDDHFYYTLANNNDLSEKG |
| | | YAFFISMFLERKYSYLFLKKLSGFKRGDSLQYRLTLEVFTALSTKPPVER |
| | | LRTTKDTKQDRALDILNELSKIPIELYQTLEPKYREMYNETLQPTDAE |
| | | DPYGLPDRSRIRFRSRFEAFALHFLDKQADFKEIGFYTYLGNYFHNGY |
| | | QKTRVDRETKDRYINFQLAGFCKNIQDISAKKLSEALNVKSIDISTDSI |
| | | PDINSFEPYLVQSTPHYIVNGNNIGIKVLPEGKDTYPTIDEKGAKMPI |
| | | ADFWLSKYELPAMLFYTYLRNNNIHKSHCPLSVKDIIERSIHKSTKQK |
| | | HPEERSELMLRRVMKAIFWTDSKLNEVERIKSQKSAFGKRQHEILKA |
| | | GRIAETLVRDMLWLQPSKNNGRDKVTEPNFQAIQVSLAYFGIRRND |
| | | LTEIFTRAGLINSSNPHPFLAQIGTNYTSLIEFYIAYLKERKVYFSRIQKK |
| | | ILQGKLNIQCHPLRDLQREPNKPQDKEEAIFLPRGLFNEAIINCLKKSK |
| | | LKQLIESPTREKSPALNVSYLIQNYFRTYFEDQSQEFYAQPRNYRLFD |
| | | KLSPNKGKSKSYLSLEQRIKKMEELRPSKIPVAEANKLLEKEDRLYRKN |
| | | YNEICDNESIIRLYQIQDILLFMMTKEYLPSDLYNRINKYKLENVKGIL |
| | | NERVSYLIDLNPLKIQGEDIKIKDYGKLFYIHHDTRISSLNKVLSKVKRN |
| | | NSISSSVKIQPYENYKRECLDFEEAQIQIIPIIHSFEIAMVSMFPDLKKA |
| | | TPGNYYDFNELITEYEKRTKQKIGSSFLIKTRNMFLHDKYEAECIKEIS |
| | | DDFVYAKKIIAEFKMKIENIKLEDLSNDSSA |
| 220 | Cas13 | MGKLYGYKRWYEIEQNNGEKGSFKRKIRVKRVYDEESKSYVVRRDE |
| | | VEDTELIKNKNFIINLKDYKTRNSNIQKFYDKFHVGNILFKLKASVKKG |
| | | KKTFYKDLEKAETVLTNVEILEQTIKLANNSKINRKKLEKELTQLNINEK |
| | | SEEVTIDNIKIYLRQGEKFDKKENINAIKWRKLTSEELTIKVEIYRECQSI |
| | | NSNLYSLLDYVLSNEEYDDRYYLEEVENKLLIFGTGNKNKNGRNYYYF |
| | | DYVLKSLSKIKGLIKKDDRNLNYLMFLFNIQKTSENKEHFINKIFNYFK |
| | | YEVRIEKEDIVEFLVGELEYYDLIKRIEKKPSENQNQTNLEKTYILLDKH |
| | | EKLKETIDTKNEIVQKLTIELKNNNLRNRIEIILHKYKILELVDKLNKNIK |
| | | NGKINTELYGIYKEHYGQCIEYINFNELALEEKELYKIIYRYLKGRIEKLL |
| | | QNRNKIKIGELRIEDIFIFQKLLEKIEIRVKQYLLEHILYLGKLKHHNIDE |
| | | VNTIRFVEEHANEELSLELITLFSATNVELNRLLKVKGENGSYEKDYDF |
| | | FSAKPDKGKIKIKDTNSVMKFELLKKLKFINSEATETNQEAIDFLKEAY |
| | | NLRNNILHGKNEEIIEDNKKNLSKSYKNINELIEELRPSDNEICKSLNLD |
| | | IIFKGNRKINDINAKLFGNNREKIYLPSFSKLVPEIKNIIESYDKNGTFN |
| | | DERIKKIVLNGAIYVNKILYLKECSNKDGEFIKNLKEELNKDSKEKSKYV |
| | | SIEELYKKSQISASKGNKKAIYKYQRKIIEIYLKYLKENYVEILDFSKLNLN |
| | | IEQIENDIKNRKNSENKVLIESIKQKVFPENDFEYIISIFALLNDNIFINKI |
| | | RNRFFSTDTWLKNNRYSNIIKILDEVISVNLLRTELLNTSIDIEEIKDDV |
| | | LTEDIENIIPEIREEILQRTKKDFKTLLGNNAISKEGLSNEDIDKIRNIED |
| | | AKINLDFVNNEIKVSLKEYGSLPPNGVLSRNTSKYYNNEIAKKIDQISIL |
| | | TFTKKSIGTISDEKFRNIYWQERKESDESKKIFVYNKNILYLVTKHSFEK |
| | | LYKNFLEEELNNLKLEDTKYLRDLDLRREKNLKVDNTLKEINEKVRGY |
| | | SKEYKKKFIENLKNNDEYFGKVVSGRFKNYQEFKEIYDEVSEYKKIRD |
| | | VVNFNPLNKVYNYLIEINWKLAIQMARAERDLHYIVNGLNELKLIEL |
| | | NQGQNDGISRAYPKYKLNKEKNKKELRLEECHYNFDIDNYKKFEKIC |
| | | EKLGIDLSENGELQQENETNIRNYISHFYILRKPFVDISISEAIKRVSKLL |
| | | SYRTRYNNSTYSSVFEVFKKDVELNYDFLKKKIELNGKTYDEVVQRKK |
| | | ISCLELESYLDYKPIIKKILF |
| 221 | Cas13 | MGAIENKHIFAAYANLAIDGLIKTLNFIAKKLDTQKQLSSWDIKHVITL |
| | | IDSIFDQNPQNNLEQVVEGYLPWIKPIIEMKTPKKGERQSDKLCIEYK |
| | | TIITAFASLLNDVRNYYTHYYHDPICIYPGGYDIPSSLNCIYDSAINIIKE |
| | | RFQAEEKEIEHLRRYTRKKGRVVLKTEDDHFYYTLVNNNDLSEKGYA |
| | | FFISMFLERKYSYLFLKKLSGFKRGDSLQYRLTLEVFTALSTKPPVERLR |
| | | TTKDTKQDRALDILNELSRIPIELYQTLEPKYREMYNETLQPTDAEDP |
| | | YGLPDRSRIRFRSRFEAFALHFLDKQADFKEIGFYTYLGNYFHNGYOK |
| | | TRVDRETKDRYINFQLAGFCKNIQDISAKKLSEALNVKSIDISTDSIPDI |
| | | NSFEPYLVQSTPHYIVNGNNIGIKVLPEGKDTYPTIDEKGAKMPIADF |
| | | WLSKYELPAMLFYTYLRNNNIHKSHCPLSVKDIIERSIHKSTKOKHPE |
| | | ERSELMLRRVMKAIFWTDSKLNEVERIKSQKSAFGKRQHEILKAGRI |
| | | AETLVRDMLWLQPSKNNGRDKVTEPNFQAIQVSLAYFGIRRNDLTE |
| | | IFTRAGLINSSNPHPFLAQIGTNYTSLIEFYIAYLKERKVYFSRIQKKILO |
| | | GKLNIQCHPLRDLQREPNKPQDKEEAIFLPRGLFNEAIINCLKKSKLK |
| | | QLIESPTREKSPALNVSYLIQNYFRTYFEDQSQEFYAQPRNYRLFDKL |
| | | SPNKGKSKSYLSLEQRIKKMEELRPSKIPVAEANKLLEKEDRLYRKNY |
| | | NEICDNESIIRLYQIQDILLFMMTKEYLPSDLYNRINKYKLENVKGILN |
| | | ERVSYLIDLNPLKIQGEDIKIKDYGKLFYIHHDTRISSLNKVLSKVKRNN |
| | | SISSSVKIQPYENYKRECLDFEEAQIQIIPIIHSFEIAMVSMFPDLKKAT |
| | | PGNYYDFNELITEYEKRTKQKIDSSFRIKTRNMFLHDKYEAECIKEISD |
| | | DFVYAKKIIAEFKMKIENIKLEDLSNDSSA |
| 222 | Cas13 | MGAIENKHIFAAYANLAIDGLIKTLNFIAKKLDTQKQLSSWDIKHVITL |
| | | IDSIFDQNPQNNLEQVVEGYLPWIKPIIEMKTPKKGERQSDKLCIEYK |
| | | TIITAFASLLNDVRNYYTHYYHDPICIYPGGYDIPSSLNCIYDSAINIIKE |
| | | RFQAEEKEMEHLRRYTRKKGRVVLKTEDDHFYYTLANNNDLSEKGY |
| | | AFFISMFLERKYSYLFLKKLSGFKRGDSLQYRLTLEVFTALSTKPPVERL |
| | | RTTKDTKQDRALDILNELSKIPIELYQTLEPKYREMYNETLQPTDAED |
| | | PYGLPDRSRIRFRSRFEAFALHFLDKQADFKEIGFYTYLGNYFHNGYQ |
| | | KTRVDRETKDRYINFQLAGFCKNIQDISAKKLSEALNVKSIDISTDSIP |
| | | DINSFEPYLVQSTPHYIVNGNNIGIKVLPEGKDTYPTIDEKGAKMPIA |
| | | DFWLSKYELPAMLFYTYLRNNNIHKSHCPLSVKDIIERSIHKSTKQKH |
| | | PEERSELMLRRVMKAIFWTDSKLNEVERIKSQKSAFGKRQHEILKAG |
| | | RIAETLVRDMLWLQPSKNNGRDKVTEPNFQAIQVSLAYFGIRRNDL |
| | | TEIFTRAGLINSSNPHPFLAQIGTNYTSLIEFYIAYLKERKVYFSRIQKKI |
| | | LQGKLNIQCHPLRDLQREPNKPQEKEEAIFLPRGLFNEAIINCLKKSKL |
| | | KHLIESPTREKSPALNVSYLIQNYFRAYFEDQSQEFYAQPRNYRLFDN |
| | | LSPNKGKSKSYLSLEQRIKKMEELRPSKIPVAEANKLLEKEDRLYRKNY |
| | | NEICDNESIIRLYQIQDILLFMMTKEYLPSDLYNRINKYKLENVKGILN |
| | | ERVSYLIDLNPLKIQGEDIKIKDYGKLFYIHHDTRISSLNKVLSKVKRNN |
| | | SISSSVKIQPYENYKRECLDFEEAQIQIIPIIHSFEIAMVSMFPDLKKAT |
| | | PGNYYDFNELITEYEKRTKQKIDSSFLIKTRNMFLHDKYEAECIKEISD |
| | | DFVYAKKIIAEFKMKIENIKLEDFSNDSSA |
| 223 | Cas13 | MGAIENKHIFAAYANLAIDGLIKTLNFIAKKLDTQKQLSSWDIKHVITL |
| | | IDSIFDQNPQNNLEQVVEGYLPWIKPIIEMKTPKKGERQSDKLCIEYK |
| | | TIITAFASLLNDVRNYYTHYYHDPICIYPGGYDIPSSLNCIYDSAINIIKE |
| | | RFQAEEKEMEHLRRYIRKKGRVVLKTEDDHFYYTLANNNDLSEKGY |
| | | AFFISMFLERKYSYLFLKKLSGFKRGDSLQYRLTLEVFTALSTKPPVERL |
| | | RTTKDTKQDRALDILNELSRIPIELYQTLEPKYREMYNETLOPTDAED |
| | | PYGLPDRSRIRFRSRFEAFALHFLDKQADFKEIGFYTYLGNYFHNGYQ |
| | | KTRVDRETKDRYINFQLAGFCKNIQDISAKKLSEALNVKSIDISTDSIP |
| | | DINSFEPYLVQSTPHYIVNGNNIGIKVLPEGKDTYPTIDEKGAKMPIA |
| | | DFWLSKYELPAMLFYTYLRNNNIHKSHCPLSVKDIIERSIHKSTKOKH |
| | | PEERSELMLRRVMKAIFWTDSKLNEVERIKSQKSAFGKRQHEILKAG |
| | | RIAETLVRDMLWLQPSKNNGRDKVTEPNFQAIQVSLAYFGIRRNDL |
| | | TEIFTRAGLINSSNPHPFLAQIGTNYTSLIEFYIAYLKERKVYFSRIOKKI |
| | | LQGKLNIQCHPLRDLQREPNKPQEKEEAIFLPRGLFNEAIINCLKKSKL |
| | | KQLIESPTREKSPVLNVSYLIQNYFRAYFEDQSQEFYAQPRNYRLFDK |
| | | LSPNKGKSKSYLSLEQRIKKMEELRPSKIPVAEANKLLEKEDRLYRKNY |
| | | NEICDNESIIRLYQIQDILLFMMTKEYLPSDLYNRINKYKLENVKGILN |
| | | ERVSYLIDLNPLKIQGEDIKIKDYGKLFYIHHDTRISSLNKVLSKVKRNN |
| | | SISSSVKIQPYENYKRECLDFEEAQIQIIPIIHSFEIAMVSMFPDLKKAT |
| | | PGNYYDFNELITEYEKRTKQKIDSSFLIKTRNMFLHDKYEAECIKEISD |
| | | DFVYAKKIIAEFKMKIENIKLEDFSNDSSA |
| 224 | Cas13 | MGAIENKHIFAAYANLAIDGLIKTLNFIAKKLDTQKQLSSWDIKFMTL |
| | | IDSIFDQNPQNNLEQVVEGYLPWIKPIIEMKTPKKGERQSDKLCIEYK |
| | | TIITAFASLLNDVRNYYTHYYHDPICIYPGGYDIPSSLNCIYDSAINIIKE |
| | | RFQAEEKEMKHLRNYTLVNNNGLSEKGYAFFISKFLERKYSYLFLKKL |
| | | SGFKRGDSLQYRLTLEVFTALSTKPPVERLRTTKDTKQDRALDILNELS |
| | | KIPIELYQTLEPKYREMYNETLQPTDAEDPYGLPDRSRIRFRSRFEAFA |
| | | LHFLDKQADFKEIGFYTYLGNYFHNGYQKTRVDRETKDRYINFQLAG |
| | | FCKNIQDISAKKLSEALNVKSIDISTDSIPDINSFEPYLVQSTPHYIVNG |
| | | NNIGIKVLPEGKDTYPTIDEKGAKMPIADFWLSKYELPAMLFYTYLR |
| | | NNNIHKSHCPLSVKDIIERSIHKSTKQKHPEERSELMLRRVMKAIFWT |
| | | DSKLNEVERIKSQKSAFGKRQHEILKAGRIAETLVRDMLWLQPSKNN |
| | | GRDKVTEPNFQAIQVSLAYFGIRRNDLTEIFTRAGLINSSNPHPFLAQ |
| | | IGTNYTSLIEFYIAYLKERKVYFSRIQKKILQGKLNIQCHPLRDLQREPN |
| | | KPQEKEEAIFLPRGLFNEAIINCLKKSKLKQLIESPTREKSPALNVSYLIQ |
| | | NYFRTYFEDQSQEFYAQPRNYRLFDKLSPNKGKSKSYLSLEQRIKKM |
| | | EELRPSKIPVAEANKLLEKEDRLYRKNYNEICDNESIIRLYQIQDILLFM |
| | | MTKEYLPSDLYNRINKYKLENVKGILNERVSYLIDLNPLKIQGEDIKIK |
| | | DYGKLFYIHHDTRINSLNKVLSKVKRNNSISSSVKIQPYENYKRECLDF |
| | | EEAQIQIIPIIHSFEIAMVSMFPDLKKATPGNYYDFNELITEYEKRTKQ |
| | | KIDSSFLIKTRNMFLHDKYEAECIKEISDDLVYAKKIIAEFKMKIENIKLE |
| | | DLSNDSSA |
| 225 | Cas13 | MGAIKNKHIFAAYANLAIDGLIKTLNFIAKKLDTQKQLSSWDIKHVIT |
| | | LIDSIFDQNPQNNLEQVVEGYLPWIKPIIEMKTPKKGERQSDKLCIEY |
| | | KTIITAFASLLNDVRNYYTHYYHDPICIYPGGYDIPSSLNCIYDSAINIIK |
| | | ERFQAEEKEMEHLRRYTRKKGRVVLKTEDDHFYYTLANNNDLSEKG |
| | | YAFFISMFLERKYSYLFLKKLSGFKRGDSLQYRLTLEVFTALSTKPPVER |
| | | LRTTKDTKQDRALDILNELSKIPIELYQTLEPKYREMYNETLQPTDAE |
| | | DPYGLPDRSRIRFRSRFEAFALHFLDKQADFKEIGFYTYLGNYFHNGY |
| | | QKTRVDRETKDRYINFQLAGFCKNIQDISAKKLSEALNVKSIDISTDSI |
| | | PDINSFEPYLVQSTPHYIVNGNNIGIKVLPEGKDTYPTIDEKGAKMPI |
| | | ADFWLSKYELPAMLFYTYLRNNNIHKSHCPLSVKDIIERSIHKSTKQK |
| | | HPEERSELMLRRVMKAIFWTDSKLNEVERIKSQKSAFGKRQHEILKA |
| | | GRIAETLVRDMLWLQPSKNNGRDKVTEPNFQAIQVSLAYFGIRRND |
| | | LTEIFTRAGLINSSNPHPFLAQIGTNYTSLIEFYIAYLKERKVYFSRIQKK |
| | | ILQGKLNIQCHPLRDLQREPNKPQDKEEAIFLPRGLFNEAIINCLKKSK |
| | | LKQLIESPTREKSPALNVSYLIQNYFRTYFEDQSQEFYAQPRNYRLFD |
| | | KLSPNKGKSKSYLSLEQRIKKMEELRPSKIPVAEANKLLEKEDRLYRKN |
| | | YNEICDNESIIRLYQIQDILLFMMTKEYLPSDLYNRINKYKLENVKGIL |
| | | NERVSYLIDLNPLKIQGEDIKIKDYGKLFYIHHDTRISSLNKVLSKVKRN |
| | | NSISSSVKIQPYENYKRECLDFEEAQIQIIPIIHSFEIAMVSMFPDLKKA |
| | | TPGNYYDFNELITEYEKRTKQKIGSSFLIKTRNMFLHDKYEAECIKEIS |
| | | DDFVYAKKIIAEFKMKIENIKLEDLSNDSSA |
| 226 | Cas13 | MGAIENKHIFAAYANLAIDGLIKTLNFIAKKLDTQKQLSSWDIKHVITL |
| | | IDSIFDQNPQNNLEQVVEGYLPWIKPIIEMKTPKKGERQSDKLCIEYK |
| | | TIITAFASLLNDVRNYYTHYYHDPICIYPGGYDIPSSLNCIYDSAINIIKE |
| | | RFQAEEKEMEHLRRYTRKKGRVVLKTEDDHFYYTLANNNDLSEKGY |
| | | AFFISMFLERKYSYLFLKKLSGFKRGDSLQYRLTLEVFTALSTKPPVERL |
| | | RTTKDTKQDRALDILNELSRIPIELYQTLEPKYREMYNETLQPTDAED |
| | | PYGLPDRSRIRFRSRFEAFALHFLDKQADFKEIGFYTYLGNYFHNGYQ |
| | | KTRVDRETKDRYINFQLAGFCKNIQDISAKKLSEALNVKSIDISTDSIP |
| | | DINSFEPYLVQSTPHYIVNGNNIGIKVLPEGKDTYPTIDEKGAKMPIA |
| | | DFWLSKYELPAMLFYTYLRNNNIHKSHCPLSVKDIIERSIHKSTKQKH |
| | | PEERSELMLRRVMKAIFWTDSKLNEVERIKSQKSAFGKRQHEILKAG |
| | | RIAETLVRDMLWLQPSKNNGRDKVTEPNFQAIQVSLAYFGIRRNDL |
| | | TEIFTRAGLINSSNPHPFLAQIGTNYTSLIEFYIAYLKERKVYFSRIQKKI |
| | | LQGKLNIQCHPLRDLQREPNKPQEKEEAIFLPRGLFNEAIINCLKKSKL |
| | | KQLIESPTREKSPALNVSYLILNYFRTYFEDQSQEFYAQPRNYRLFDKL |
| | | SPNKGKSKSYLSLEQRIKKMEELRPSKIPVAEANKLLEKEDRLYRKNY |
| | | NEICDNESIIRLYQIQDILLFMMTKEYLPSDLYNRINKYKLENVKGILN |
| | | ERVSYLIDLNPLKIQGEDIKIKDYGKLFYIHHDTRINSLNKVLSKVKRN |
| | | NSISSSVKIQPYENYKRECLDFEEAQIQIIPIIHSFEIAMVSMFPDLKKA |
| | | TPGNYYDFNELITEYEKRTKQKIDSSFLIKTRNMFLHDKYEAECIKEIS |
| | | DDFVYAKKIIAEFKMKIENIKLEDFSNDSSA |
| 227 | Cas13 | MGAIENKHIFAAYANLAIDGLIKTLNFIAKKLDTQKQLSSWDIKHVITL |
| | | IDSIFDQNPQNNLEQVVEGYLPWIKPIIEMKTPKKGERQSDKLCIEYK |
| | | TIITAFASLLNDVRNYYTHYYHDPICIYPGGYDIPSSLNCIYDSAINIIKE |
| | | RFQAEEKEMEHLRRYTRKKGRVVLKTEDDHFYYTLANNNDLSEKGY |
| | | AFFISMFLERKYSYLFLKKLSGFKRGDSLQYRLTLEVFTALSTKPPVERL |
| | | RTTKDTKQDRALDILNELSKIPIELYQTLEPKYREMYNETLQPTDAED |
| | | PYGLPDRSRIRFRSRFEAFALHFLDKQADFKEIGFYTYLGNYFHNGYQ |
| | | KTRVDRETKDRYINFQLAGFCKNIQDISAKKLSEALNVKSIDISTDSIP |
| | | DINSFEPYLVQSTPHYIVNGNNIGIKVLPEGKDTYPTIDEKGAKMPIA |
| | | DFWLSKYELPAMLFYTYLRNNNIHKSHCPLSVKDIIERSIHKSTKQKH |
| | | PEERSELMLRRVMKAIFWTDSKLNEVERIKSQKSAFGKRQHEILKAG |
| | | RIAETLVRDMLWLQPSKNNGRDKVTEPNFQAIQVSLAYFGIRRNDL |
| | | TEIFTRAGLINSSNPHPFLAQIGTNYTSLIEFYIAYLKERKVYFSRIQKKI |
| | | LQGKLNIQCHPLRDLQREPNKPQEKEEAIFLPRGLFNEAIINCLKKSKL |
| | | KHLIESPTREKSPALNVSYLIQNYFRAYFEDQSQEFYAQPRNYRLFDN |
| | | LSPNKGKSKSYLSLEQRIKKMEELRPSKIPVAEANKLLEKEDRLYRKNY |
| | | NEICDNESIIRLYQIQDILLFMMTKEYLPSDLYNRINKYKLENVKGILN |
| | | ERVSYLIDLNPLKIQGEDIKIKDYGKLFYIHHDTRISSLNKVLSKVKRNN |
| | | SISSSVKIQPYENYKRECLDFEEAQIQIIPIIHSFEIAMVSMFPDLKKAT |
| | | PGNYYDFNELITEYEKRTKQKIDSSFLIKTRNMFLHDKYEAECIKEISD |
| | | DFVYAKKIIAEFKMKIENIKLEDFSNDSSA |
| 228 | Cas13 | MGAIENKHIFAAYANLAIDGLIKTLNFIAKKLDTQKQLSSWDIKHVITL |
| | | IDSIFDQNPQNNLEQVVEGYLPWIKPIIEMKTPKKGERQSDKLCIEYK |
| | | TIITAFASLLNDVRNYYTHYYHDPICIYPGGYDIPSSLNCIYDSAINIIKE |
| | | RFQAEEKEMEHLRRYTRKKGRVVLKTEDDHFYYTLANNNDLSEKGY |
| | | AFFISMFLERKYSYLFLKKLSGFKRGDSLQYRLTLEVFTALSTKPPVERL |
| | | RTTKDTKQDRALDILNELSKIPIELYQTLEPKYREMYNETLQPTDAED |
| | | PYGLPDRSRIRFRSRFEAFALHFLDKQADFKEIGFYTYLGNYFHNGYQ |
| | | KTRVDRETKDRYINFQLAGFCKNIQDISAKKLSEALNVKSIDISTDSIP |
| | | DINSFEPYLVQSTPHYIVNGNNIGIKVLPEGKDTYPTIDEKGAKMPIA |
| | | DFWLSKYELPAMLFYTYLRNNNIHKSHCPLSVKDIIERSIHKSTKOKH |
| | | PEERSELMLRRVMKAIFWTDSKLNEVERIKSQKSAFGKRQHEILKAG |
| | | RIAETLVRDMLWLQPSKNNGRDKVTEPNFQAIQVSLAYFGIRRNDL |
| | | TEIFTRAGLINSSNPHPFLAQIGTNYTSLIEFYIAYLKERKVYFSRIOKKI |
| | | LQGKLNIQCHPLRDLQREPNKPQEKEEAIFLPRGLFNEAIINCLKKSKL |
| | | KHLIESPTREKSPALNVSYLIQNYFRAYFEDQSQEFYAQPRNYRLFDN |
| | | LSPNKGKSKSYLSLEQRIKKMEELRPSKIPVAEANKLLEKEDRLYRKNY |
| | | NEICDNESIIRLYQIQDILLFMMTKEYLPSDLYNRINKYKLENVKGILN |
| | | ERVSYLIDLNPLKIQGEDIKIKDYGKLFYIHHDTRISSLNKVLSKVKRNN |
| | | SISSSVKIQPYENYKRECLDFEEAQIQIIPIIHSFEIAMVSMFPDLKKAT |
| | | PGNYYDFNELITEYEKRTKQKIDSSFLIKTRNMFLHDKYEAECIKEISD |
| | | DFVYAKKIIAEFKMKIENIKLEDFSNDSSA |
| 229 | Cas13 | MEKPLLPNVYTLKHKFFWGAFLNIARHNAFITICHINEQLGLKTPSN |
| | | DDKIVDVVCETWNNILNNDHDLLKKSQLTELILKHFPFLTAMCYHPP |
| | | KKEGKKKGHQKEQQKEKESEAQSQAEALNPSKLIEALEILVNQLHSL |
| | | RNYYSHYKHKKPDAEKDIFKHLYKAFDASLRMVKEDYKAHFTVNLTR |
| | | DFAHLNRKGKNKQDNPDFNRYRFEKDGFFTESGLLFFTNLFLDKRD |
| | | AYWMLKKVSGFKASHKQREKMTTEVFCRSRILLPKLRLESRYDHNQ |
| | | MLLDMLSELSRCPKLLYEKLSEENKKHFQVEADGFLDEIEEEQNPFK |
| | | DTLIRHQDRFPYFALRYLDLNESFKSIRFQVDLGTYHYCIYDKKIGDEQ |
| | | EKRHLTRTLLSFGRLQDFTEINRPQEWKALTKDLDYKETSNQPFISKT |
| | | TPHYHITDNKIGFRLGTSKELYPSLEIKDGANRIAKYPYNSGFVAHAFI |
| | | SVHELLPLMFYQHLTGKSEDLLKETVRHIQRIYKDFEEERINTIEDLEK |
| | | ANQGRLPLGAFPKQMLGLLQNKQPDLSEKAKIKIEKLIAETKLLSHRL |
| | | NTKLKSSPKLGKRREKLIKTGVLADWLVKDFMRFQPVAYDAQNQPI |
| | | KSSKANSTEFWFIRRALALYGGEKNRLEGYFKQTNLIGNTNPHPFLN |
| | | KFNWKACRNLVDFYQQYLEQREKFLEAIKNQPWEPYQYCLLLKIPKE |
| | | NRKNLVKGWEQGGISLPRGLFTEAIRETLSEDLMLSKPIRKEIKKHGR |
| | | VGFISRAITLYFKEKYQDKHQSFYNLSYKLEAKAPLLKREEHYEYWQQ |
| | | NKPQSPTESQRLELHTSDRWKDYLLYKRWQHLEKKLRLYRNQDVM |
| | | LWLMTLELTKNHFKELNLNYHQLKLENLAVNVQEADAKLNPLNQTL |
| | | PMVLPVKVYPATAFGEVQYHKTPIRTVYIREEHTKALKMGNFKALVK |
| | | DRRLNGLFSFIKEENDTQKHPISQLRLRRELEIYQSLRVDAFKETLSLEE |
| | | KLLNKHTSLSSLENEFRALLEEWKKEYAASSMVTDEHIAFIASVRNAF |
| | | CHNQYPFYKEALHAPIPLFTVAQPTTEEKDGLGIAEALLKVLREYCEIV |
| | | KSQI |
| 230 | Cas13 | MEKPLLPNVYTLKHKFFWGAFLNIARHNAFITICHINEQLGLKTPSN |
| | | DDKIVDVVCETWNNILNNDHDLLKKSQLTELILKHFPFLTAMCYHPP |
| | | KKEGKKKGHQKEQQKEKESEAQSQAEALNPSKLIEALEILVNQLHSL |
| | | RNYYSHYKHKKPDAEKDIFKHLYKAFDASLRMVKEDYKAHFTVNLTR |
| | | DFAHLNRKGKNKQDNPDFNRYRFEKDGFFTESGLLFFTNLFLDKRD |
| | | AYWMLKKVSGFKASHKQREKMTTEVFCRSRILLPKLRLESRYDHNQ |
| | | MLLDMLSELSRCPKLLYEKLSEENKKHFQVEADGFLDEIEEEQNPFK |
| | | DTLIRHQDRFPYFALRYLDLNESFKSIRFQVDLGTYHYCIYDKKIGDEQ |
| | | EKRHLTRTLLSFGRLQDFTEINRPQEWKALTKDLDYKETSNQPFISKT |
| | | TPHYHITDNKIGFRLGTSKELYPSLEIKDGANRIAKYPYNSGFVAHAFI |
| | | SVHELLPLMFYQHLTGKSEDLLKETVRHIQRIYKDFEEERINTIEDLEK |
| | | ANQGRLPLGAFPKQMLGLLQNKQPDLSEKAKIKIEKLIAETKLLSHRL |
| | | NTKLKSSPKLGKRREKLIKTGVLADWLVKDFMRFQPVAYDAQNQPI |
| | | KSSKANSTEFWFIRRALALYGGEKNRLEGYFKQ.TNLIGNTNPHPFLN |
| | | KFNWKACRNLVDFYQQYLEQREKFLEAIKNQPWEPYQYCLLLKIPKE |
| | | NRKNLVKGWEQGGISLPRGLFTEAIRETLSEDLMLSKPIRKEIKKHGR |
| | | VGFISRAITLYFKEKYQDKHQSFYNLSYKLEAKAPLLKREEHYEYWQQ |
| | | NKPQSPTESQRLELHTSDRWKDYLLYKRWQHLEKKLRLYRNQDVM |
| | | LWLMTLELTKNHFKELNLNYHQLKLENLAVNVQEADAKLNPLNQTL |
| | | PMVLPVKVYPATAFGEVQYHKTPIRTVYIREEHTKALKMGNFKALVK |
| | | DRRLNGLFSFIKEENDTQKHPISQLRLRRELEIYQSLRVDAFKETLSLEE |
| | | KLLNKHTSLSSLENEFRALLEEWKKEYAASSMVTDEHIAFIASVRNAF |
| | | CHNQYPFYKEALHAPIPLFTVAQPTTEEKDGLGIAEALLKVLREYCEIV |
| | | KSOI |
| 231 | Cas13 | MDTPNFSERIPVSLQSHPYYFAHYLNMARHNAYVILEYVNRELIKPG |
| | | KNLDEDNLIQSTVLKDGYFDRKPDELSHRNRLLVQHFPFLREAENEG |
| | | ARTCNPVSYKLKTALAALNQWRNNASHYPLNQNHEKDFDLQPFFS |
| | | FAIEACKKRMREVFQPDDFYLLETNEKQFYTLHNENGFTEKGLYCFIC |
| | | FFLEKKYAFQFLAGIKGFKNTTDNKFRATLETFTEHCCRLPKPKLDSS |
| | | DIKLDMLGELSRCPAPLFDLLDIEERKKFIREPEEVKPDESGDREEVQ |
| | | QVLMKRYDDRFPYFALRYFEEKNLLKGISFHIHIGRWIKSEHTKKIMG |
| | | AERDRRLLKDIRTFGELKEFSPEHAPDYWLRDGITPDDVDQFSPQYR |
| | | IVGNRIGIKLNYNGHNRWSVPDKEINVKPDAIISTYEFLNLFLYEHLY |
| | | QKKLTGLSPAEFIQDYLDRFNNFLSEFKAGHIRPVGDFSLEKRRGQG |
| | | DEPDLTARRKSLQKELDRFVLKGKDLPDKIREYLLGYKQKSEKKQAK |
| | | WILGGMIKETVYWRNKAEQSPEKMRSGDMAQQLARDIIFLTPPHT |
| | | VKEHKQKLNSLEYDVLQYALAYFSSNREKLYSFFKEHQLTVKGDRAH |
| | | PFLYKIRLDECQGILDFFIVYMQQKEKWLGWLDRNLKSPRLNEEEFF |
| | | NTYSYFIKTDTKRAIEMDYESCPNYLPRGIFNEPIAKALQKAGVKIKDE |
| | | DNASYALSVYSNGKTQPFYNKERYYNKGIFRMEELPEKLQPKELLGKI |
| | | QWTIKSSGKDTEEFRSLQNLKNRILNTEKEIRYVQSTDRALWIMVAD |
| | | LFPETFELRPDDLECIGHDLSDDLLSRPYQMKEKVYNYTITDYLPIKRY |
| | | GEFRRFLKDRRLENLLTYFEEGVPLHREALVAELEAYDLQRKNLLEIIY |
| | | RFEKLVFDRHRHELTFSGEGENQYVNHWDYLDFVARKYGLSAEVKE |
| | | LNSERFTELRNKMLHNQIPYQLWIKEAIAAREENTVCGRIMGMIGEI |
| | | YERMTTEIEKQMQV |
| 232 | Cas13 | MEKPLLPNVYTLKHKFFWGAFLNIARHNAFITICHINEQLGLKTPSN |
| | | DDKIVDVVCETWNNILNNDHDLLKKSQLTELILKHFPFLTAMCYHPP |
| | | KKEGKKKGHQKEQQKEKESEAQSQAEALNPSKLIEALEILVNQLHSL |
| | | RNYYSHYKHKKPDAEKDIFKHLYKAFDASLRMVKEDYKAHFTVNLTR |
| | | DFAHLNRKGKNKQDNPDFNRYRFEKDGFFTESGLLFFTNLFLDKRD |
| | | AYWMLKKVSGFKASHKQREKMTTEVFCRSRILLPKLRLESRYDHNQ |
| | | MLLDMLSELSRCPKLLYEKLSEENKKHFQVEADGFLDEIEEEQNPFK |
| | | DTLIRHQDRFPYFALRYLDLNESFKSIRFQVDLGTYHYCIYDKKIGDEQ |
| | | EKRHLTRTLLSFGRLQDFTEINRPQEWKALTKDLDYKETSNQPFISKT |
| | | TPHYHITDNKIGFRLGTSKELYPSLEIKDGANRIAKYPYNSGFVAHAFI |
| | | SVHELLPLMFYQHLTGKSEDLLKETVRHIQRIYKDFEEERINTIEDLEK |
| | | ANQGRLPLGAFPKQMLGLLQNKQPDLSEKAKIKIEKLIAETKLLSHRL |
| | | NTKLKSSPKLGKRREKLIKTGVLADWLVKDFMRFQPVAYDAQNQPI |
| | | KSSKANSTEFWFIRRALALYGGEKNRLEGYFKQTNLIGNTNPHPFLN |
| | | KFNWKACRNLVDFYQQYLEQREKFLEAIKNQPWEPYQYCLLLKIPKE |
| | | NRKNLVKGWEQGGISLPRGLFTEAIRETLSEDLMLSKPIRKEIKKHGR |
| | | VGFISRAITLYFKEKYQDKHQSFYNLSYKLEAKAPLLKREEHYEYWQQ |
| | | NKPQSPTESQRLELHTSDRWKDYLLYKRWQHLEKKLRLYRNQDVM |
| | | LWLMTLELTKNHFKELNLNYHQLKLENLAVNVQEADAKLNPLNQTL |
| | | PMVLPVKVYPATAFGEVQYHKTPIRTVYIREEHTKALKMGNFKALVK |
| | | DRRLNGLFSFIKEENDTQKHPISQLRLRRELEIYQSLRVDAFKETLSLEE |
| | | KLLNKHTSLSSLENEFRALLEEWKKEYAASSMVTDEHIAFIASVRNAF |
| | | CHNQYPFYKEALHAPIPLFTVAQPTTEEKDGLGIAEALLKVLREYCEIV |
| | | KSQI |
| 233 | Cas13 | MENKTSLGNNIYYNPFKPQDKSYFAGYFNAAMENTDSVFRELGKRL |
| | | KGKEYTSENFFDAIFKENISLVEYERYVKLLSDYFPMARLLDKKEVPIK |
| | | ERKENFKKNFKGIIKAVRDLRNFYTHKEHGEVEITDEIFGVLDEMLKS |
| | | TVLTVKKKKVKTDKTKEILKKSIEKQLDILCQKKLEYLRDTARKIEEKRR |
| | | NQRERGEKELVAPFKYSDKRDDLIAAIYNDAFDVYIDKKKDSLKESSK |
| | | AKYNTKSDPQQEEGDLKIPISKNGVVFLLSLFLTKQEIHAFKSKIAGFK |
| | | ATVIDEATVSEATVSHGKNSICFMATHEIFSHLAYKKLKRKVRTAEIN |
| | | YGEAENAEQLSVYAKETLMMQMLDELSKVPDVVYQNLSEDVQKTF |
| | | IEDWNEYLKENNGDVGTMEEEQVIHPVIRKRYEDKFNYFAIRFLDEF |
| | | AQFPTLRFQVHLGNYLHDSRPKENLISDRRIKEKITVFGRLSELEHKKA |
| | | LFIKNTETNEDREHYWEIFPNPNYDFPKENISVNDKDFPIAGSILDRE |
| | | KQPVAGKIGIKVKLLNQQYVSEVDKAVKAHQLKQRKASKPSIQNIIEE |
| | | IVPINESNPKEAIVFGGQPTAYLSMNDIHSILYEFFDKWEKKKEKLEK |
| | | KGEKELRKEIGKELEKKIVGKIQAQIQQIIDKDTNAKILKPYQDGNSTA |
| | | IDKEKLIKDLKQEQNILOKLKDEQTVREKEYNDFIAYQDKNREINKVR |
| | | DRNHKQYLKDNLKRKYPEAPARKEVLYYREKGKVAVWLANDIKRF |
| | | MPTDFKNEWKGEQHSLLOKSLAYYEQCKEELKNLLPEKVFQHLPFK |
| | | LGGYFQQKYLYQFYTCYLDKRLEYISGLVQQAENFKSENKVFKKVEN |
| | | ECFKFLKKQNYTHKELDARVQSILGYPIFLERGFMDEKPTIIKGKTFKG |
| | | NEALFADWFRYYKEYQNFQTFYDTENYPLVELEKKQADRKRKTKIYQ |
| | | QKKNDVFTLLMAKHIFKSVFKQDSIDQFSLEDLYQSREERLGNQERA |
| | | RQTGERNTNYIWNKTVDLKLCDGKITVENVKLKNVGDFIKYEYDQR |
| | | VQAFLKYEENIEWQAFLIKESKEEENYPYVVEREIEQYEKVRREELLKE |
| | | VHLIEEYILEKVKDKEILKKGDNQNFKYYILNGLLKQLKNEDVESYKVF |
| | | NLNTEPEDVNINQLKQEATDLEQKAFVLTYIRNKFAHNQLPKKEFW |
| | | DYCQEKYGKIEKEKTYAEYFAEVFKKEKEALIK |
| 234 | Cas13 | MEKPLLPNVYTLKHKFFWGAFLNIARHNAFITICHINEQLGLKTPSN |
| | | DDKIVDVVCETWNNILNNDHDLLKKSQLTELILKHFPFLTAMCYHPP |
| | | KKEGKKKGHQKEQQKEKESEAQSQAEALNPSKLIEALEILVNQLHSL |
| | | RNYYSHYKHKKPDAEKDIFKHLYKAFDASLRMVKEDYKAHFTVNLTR |
| | | DFAHLNRKGKNKQDNPDFNRYRFEKDGFFTESGLLFFTNLFLDKRD |
| | | AYWMLKKVSGFKASHKQREKMTTEVFCRSRILLPKLRLESRYDHNQ |
| | | MLLDMLSELSRCPKLLYEKLSEENKKHFQVEADGFLDEIEEEQNPFK |
| | | DTLIRHQDRFPYFALRYLDLNESFKSIRFQVDLGTYHYCIYDKKIGDEQ |
| | | EKRHLTRTLLSFGRLQDFTEINRPQEWKALTKDLDYKETSNQPFISKT |
| | | TPHYHITDNKIGFRLGTSKELYPSLEIKDGANRIAKYPYNSGFVAHAFI |
| | | SVHELLPLMFYQHLTGKSEDLLKETVRHIQRIYKDFEEERINTIEDLEK |
| | | ANQGRLPLGAFPKQMLGLLQNKQPDLSEKAKIKIEKLIAETKLLSHRL |
| | | NTKLKSSPKLGKRREKLIKTGVLADWLVKDFMRFQPVAYDAQNQPI |
| | | KSSKANSTEFWFIRRALALYGGEKNRLEGYFKQ.TNLIGNTNPHPFLN |
| | | KFNWKACRNLVDFYQQYLEQREKFLEAIKNQPWEPYQYCLLLKIPKE |
| | | NRKNLVKGWEQGGISLPRGLFTEAIRETLSEDLMLSKPIRKEIKKHGR |
| | | VGFISRAITLYFKEKYQDKHQSFYNLSYKLEAKAPLLKREEHYEYWQQ |
| | | NKPQSPTESQRLELHTSDRWKDYLLYKRWQHLEKKLRLYRNQDVM |
| | | LWLMTLELTKNHFKELNLNYHQLKLENLAVNVQEADAKLNPLNQTL |
| | | PMVLPVKVYPATAFGEVQYHKTPIRTVYIREEHTKALKMGNFKALVK |
| | | DRRLNGLFSFIKEENDTQKHPISQLRLRRELEIYQSLRVDAFKETLSLEE |
| | | KLLNKHTSLSSLENEFRALLEEWKKEYAASSMVTDEHIAFIASVRNAF |
| | | CHNQYPFYKEALHAPIPLFTVAQPTTEEKDGLGIAEALLKVLREYCEIV |
| | | KSOI |
| 235 | Cas13 | MTEQSERPYNGTYYTLEDKHFWAAFLNLARHNAYITLTHIDRQLAYS |
| | | KADITNDQDVLSFKALWKNLDNDLERKSRLRSLILKHFSFLEGAAYG |
| | | KKLFESKSSGNKSSKNKELTKKEKEELQANALSLDNLKSILFDFLQKLK |
| | | DFRNYYSHYRHSGSSELPLFDGNMLQRLYNVFDVSVQRVKRDHEH |
| | | NDKVDPHYHFNHLVRKGKKDRYGHNDNPSFKHHFVDSEGMVTEA |
| | | GLLFFVSLFLEKRDAIWMQKKIRGFKGGTGPYEQMTNEVFCRSRISL |
| | | PKLKLESLRTDDWMLLDMLNELVRCPKPLYDRLREKDRACFRVPVDI |
| | | LPDEDDTDGGGEDPFKNTLVRHQDRFPYFALRYFDLKKVFTSLRFHI |
| | | DLGTYHFAIYKKMIGEQPEDRHLTRNLYGFGRIQDFAEEHRPEEWK |
| | | RLVRDLDYLETGDKPYISQTTPHYHIEKGKIGLRFVPEGQHLWPSPEV |
| | | GTTRTGRSKCAQDKRLTAEAFLSVHELMPMMFYYFLLREKYSEEVS |
| | | AEKVQGRIKRVIEDVYAIYDAFARDEINTLKELDTCLADKGIRRGHLP |
| | | KQMITILSQERKDMKEKIRKKLQEMIADTDHRLDMLDRQTDRKIRI |
| | | GRKNAGLPKSGVIADWLVRDMMRFQPVAKDASGKPLNNSKANST |
| | | EYRMLQRALALFGGEKERLTPYFRQMNLTGGNNPHPFLHETRWES |
| | | HTNILSFYRSYLRARKAFLERIGRSDRVENCPFLLLKEPKTDRQTLVAG |
| | | WKDEFHLPRGIFTEAVRDCLIEMGYDEVGSYREVGFMAKAVPLYFE |
| | | RACEDRVQPFYDSPFNVGNSLKPKKGRFLSKEDRAEEWERGMERF |
| | | RDLEAWSHSAARRIKDAFAGIEYASPGNKKKIEQLLRDLSLWEAFES |
| | | KLKVRADKINLAKLKKEILEAQEHPYHDFKSWQKFERELRLVKNQDII |
| | | TWMMCRDLMEENKVEGLDTGTLYLKDIRPNVQEQGSLNVLNRVK |
| | | PMRLPVVVYRADSRGHVHKEAPLATVYIEERNTKLLKQGNFKSFVK |
| | | DRRLNGLFSFVDTGGLAMEQYPISKLRVEYELAKYQTARVCVFELTL |
| | | RLEESLLSRYPHLPDESFREMLESWSDPLLAKWPELHGKVRLLIAVR |
| | | NAFSHNQYPMYDEAVFSSIRKYDPSSPDAIEERMGLNIAHRLSEEVK |
| | | QAKETVERIIQA |
| 236 | Cas13 | MEKPLPPNVYTLKHKFFWGAFLNIARHNAFITICHINEQLGLTTPPN |
| | | DDKIADVVCGTWNNILNNDHDLLKKSQLTELILKHFPFLAAMCYHP |
| | | PKKEGKKKGSQKEQQKEKENEAQSQAEALNPSELIKALKTLVKQLRT |
| | | LRNYYSHYKHKKPDAEKDIFKHLYKAFDASLRMVKEDYKAHFTVNLT |
| | | QDFAHLNRKGKNKQDNPKFDRYRFEKDGFFTESGLLFFTNLFLDKR |
| | | DAYWMLKKVSGFKASHKQSEKMTTEVFCRSRILLPKLRLESRYDHN |
| | | QMLLDMLSELSRCPKLLYEKLSEKDKKHFQVEADGFLDEIEEEQNPF |
| | | KDALIRHQDRFPYFALRYLDLNESFKSIRFQVDLGTYHYCIYDKKIGDE |
| | | QEKRHLTRTLLSFGRLQDFTEINRPQEWKALTKDLDYKETSKQPFISK |
| | | TTPHYHITDNKIGFRLGTSKELYPSLEVKDGANRIAKYPYNSDFVAHA |
| | | FISVHELLPLMFYQHLTGKSEDLLKETVRHIQRIYKDFEEERINTIEDLE |
| | | KANQGRLPLGAFPKQMLGLLQNKQPDLSEKAKIKIEKLIAETKLLSHR |
| | | LNTKLKSSPKLGKRREKLIKTGDWLVKDFMRFQPVAYDVQNQPIESS |
| | | KANSTEFQLIQRALALYGGEKNRLEGYFKQTNLIGNTNPHPFLNKFN |
| | | WKACRNLVDFYQQYLEQREKFLEAIKNQPWEPYQYCLLLKIPKENR |
| | | KNLVKGWEQGGISLPRGLFTEAIRETLSEDLTLSKPIRKEIKKHGRVGF |
| | | ISRAITLYFRERYQDDHQSFYNLPYELEAKASTPKPPLPKKREYVLRAE |
| | | HYEYWQQNKPQSPTELORLELHTSDRWKDYLLYKRWQHLEKKLRL |
| | | YRNQDVMLWLMTLELTKNHFKELKLNYHQLKLENLAVNVQEADAK |
| | | LNPLNQTLPMVLPVKVYPATAFGEVQYQETPIRTVYIREEQTKALKM |
| | | GNFKALVKDRRLNGLFSFIKEENDTQKHPISQLRLRRELEIYQSLRVD |
| | | AFKETLSLEEKLLNKHASLSSLENEFRTLLEEWKKKYAASSMVTDEHI |
| | | AFIASVRNAFCHNQYPFYKETLHAPILLFTVAQPTTEEKDGLGIAEALL |
| | | RVLREYCEIVKSQI |
| 237 | Cas13 | MEKPLLPNVYTLKHKFFWGAFLNIARHNAFITICHINEQLGLKTPSN |
| | | DDKIVDVVCETWNNILNNDHDLLKKSQLTELILKHFPFLTAMCYHPP |
| | | KKEGKKKGHQKEQQKEKESEAQSQAEALNPSKLIEALEILVNQLHSL |
| | | RNYYSHYKHKKPDAEKDIFKHLYKAFDASLRMVKEDYKAHFTVNLTR |
| | | DFAHLNRKGKNKQDNPDFNRYRFEKDGFFTESGLLFFTNLFLDKRD |
| | | AYWMLKKVSGFKASHKQREKMTTEVFCRSRILLPKLRLESRYDHNQ |
| | | MLLDMLSELSRCPKLLYEKLSEENKKHFQVEADGFLDEIEEEQNPFK |
| | | DTLIRHQDRFPYFALRYLDLNESFKSIRFQVDLGTYHYCIYDKKIGDEQ |
| | | EKRHLTRTLLSFGRLQDFTEINRPQEWKALTKDLDYKETSNQPFISKT |
| | | TPHYHITDNKIGFRLGTSKELYPSLEIKDGANRIAKYPYNSGFVAHAFI |
| | | SVHELLPLMFYQHLTGKSEDLLKETVRHIQRIYKDFEEERINTIEDLEK |
| | | ANQGRLPLGAFPKQMLGLLQNKQPDLSEKAKIKIEKLIAETKLLSHRL |
| | | NTKLKSSPKLGKRREKLIKTGVLADWLVKDFMRFQPVAYDAQNQPI |
| | | KSSKANSTEFWFIRRALALYGGEKNRLEGYFKQ.TNLIGNTNPHPFLN |
| | | KFNWKACRNLVDFYQQYLEQREKFLEAIKNQPWEPYQYCLLLKIPKE |
| | | NRKNLVKGWEQGGISLPRGLFTEAIRETLSEDLMLSKPIRKEIKKHGR |
| | | VGFISRAITLYFKEKYQDKHQSFYNLSYKLEAKAPLLKREEHYEYWQQ |
| | | NKPQSPTESQRLELHTSDRWKDYLLYKRWQHLEKKLRLYRNQDVM |
| | | LWLMTLELTKNHFKELNLNYHQLKLENLAVNVQEADAKLNPLNQTL |
| | | PMVLPVKVYPATAFGEVQYHKTPIRTVYIREEHTKALKMGNFKALVK |
| | | DRRLNGLFSFIKEENDTQKHPISQLRLRRELEIYQSLRVDAFKETLSLEE |
| | | KLLNKHTSLSSLENEFRALLEEWKKEYAASSMVTDEHIAFIASVRNAF |
| | | CHNQYPFYKEALHAPIPLFTVAQPTTEEKDGLGIAEALLKVLREYCEIV |
| | | KSQI |
| 238 | Cas13 | MENKTSLGNNIYYNPFKPQDKSYFAGYFNAAMENTDSVFRELGKRL |
| | | KGKEYTSENFFDAIFKENISLVEYERYVKLLSDYFPMARLLDKKEVPIK |
| | | ERKENFKKNFKGIIKAVRDLRNFYTHKEHGEVEITDEIFGVLDEMLKS |
| | | TVLTVKKKKVKTDKTKEILKKSIEKQLDILCOKKLEYLRDTARKIEEKRR |
| | | NQRERGEKELVAPFKYSDKRDDLIAAIYNDAFDVYIDKKKDSLKESSK |
| | | AKYNTKSDPQQEEGDLKIPISKNGVVFLLSLFLTKQEIHAFKSKIAGFK |
| | | ATVIDEATVSEATVSHGKNSICFMATHEIFSHLAYKKLKRKVRTAEIN |
| | | YGEAENAEQLSVYAKETLMMQMLDELSKVPDVVYQNLSEDVQKTF |
| | | IEDW/NEYLKENNGDVGTMEEEQVIHPVIRKRYEDKFNYFAIRFLDEF |
| | | AQFPTLRFQVHLGNYLHDSRPKENLISDRRIKEKITVFGRLSELEHKKA |
| | | LFIKNTETNEDREHYWEIFPNPNYDFPKENISVNDKDFPIAGSILDRE |
| | | KQPVAGKIGIKVKLLNQQYVSEVDKAVKAHQLKQRKASKPSIQNIIEE |
| | | IVPINESNPKEAIVFGGQPTAYLSMNDIHSILYEFFDKWEKKKEKLEK |
| | | KGEKELRKEIGKELEKKIVGKIQAQIQQIIDKDTNAKILKPYQDGNSTA |
| | | IDKEKLIKDLKQEQNILQKLKDEQTVREKEYNDFIAYQDKNREINKVR |
| | | DRNHKQYLKDNLKRKYPEAPARKEVLYYREKGKVAVWLANDIKRF |
| | | MPTDFKNEWKGEQHSLLQKSLAYYEQCKEELKNLLPEKVFQHLPFK |
| | | LGGYFQQKYLYQFYTCYLDKRLEYISGLVQQAENFKSENKVFKKVEN |
| | | ECFKFLKKQNYTHKELDARVQSILGYPIFLERGFMDEKPTIIKGKTFKG |
| | | NEALFADWFRYYKEYQNFQTFYDTENYPLVELEKKQADRKRKTKIYQ |
| | | QKKNDVFTLLMAKHIFKSVFKQDSIDQFSLEDLYQSREERLGNQERA |
| | | RQTGERNTNYIWNKTVDLKLCDGKITVENVKLKNVGDFIKYEYDOR |
| | | VQAFLKYEENIEWQAFLIKESKEEENYPYVVEREIEQYEKVRREELLKE |
| | | VHLIEEYILEKVKDKEILKKGDNQNFKYYILNGLLKQLKNEDVESYKVF |
| | | NLNTEPEDVNINQLKQEATDLEQKAFVLTYIRNKFAHNQLPKKEFW |
| | | DYCQEKYGKIEKEKTYAEYFAEVFKKEKEALIK |
| 239 | Cas13 | MFFSFHNAQRVIFKHLYKAFDASLRMVKEDYKAHFTVNLTRDFAHL |
| | | NRKGKNKQDNPDFNRYRFEKDGFFTESGLLFFTNLFLDKRDAYWM |
| | | LKKVSGFKASHKQREKMTTEVFCRSRILLPKLRLESRYDHNQMLLD |
| | | MLSELSRCPKLLYEKLSEENKKHFQVEADGFLDEIEEEQNPFKDTLIR |
| | | HQDRFPYFALRYLDLNESFKSIRFQVDLGTYHYCIYDKKIGDEQEKRH |
| | | LTRTLLSFGRLQDFTEINRPQEWKALTKDLDYKETSNQPFISKTTPHY |
| | | HITDNKIGFRLGTSKELYPSLEIKDGANRIAKYPYNSGFVAHAFISVHE |
| | | LLPLMFYQHLTGKSEDLLKETVRHIQRIYKDFEEERINTIEDLEKANQG |
| | | RLPLGAFPKQMLGLLQNKQPDLSEKAKIKIEKLIAETKLLSHRLNTKLK |
| | | SSPKLGKRREKLIKTGVLADWLVKDFMRFQPVAYDAQNQPIKSSKA |
| | | NSTEFWFIRRALALYGGEKNRLEGYFKQTNLIGNTNPHPFLNKFNW |
| | | KACRNLVDFYQQYLEQREKFLEAIKNQPWEPYQYCLLLKIPKENRKN |
| | | LVKGWEQGGISLPRGLFTEAIRETLSEDLMLSKPIRKEIKKHGRVGFIS |
| | | RAITLYFKEKYQDKHQSFYNLSYKLEAKAPLLKREEHYEYWQQNKPQ |
| | | SPTESQRLELHTSDRWKDYLLYKRWQHLEKKLRLYRNQDVMLWLM |
| | | TLELTKNHFKELNLNYHQLKLENLAVNVQEADAKLNPLNQTLPMVL |
| | | PVKVYPATAFGEVQYHKTPIRTVYIREEHTKALKMGNFKALVKDRRL |
| | | NGLFSFIKEENDTQKHPISQLRLRRELEIYQSLRVDAFKETLSLEEKLLN |
| | | KHTSLSSLENEFRALLEEWKKEYAASSMVTDEHIAFIASVRNAFCHN |
| | | QYPFYKEALHAPIPLFTVAQPTTEEKDGLGIAEALLKVLREYCEIVKSQI |
| 240 | Cas13 | MEKPLLPNVYTLKHKFFWGAFLNIARHNAFITICHINEQLGLKTPSN |
| | | DDKIVDVVCETWNNILNNDHDLLKKSQLTELILKHFPFLTAMCYHPP |
| | | KKEGKKKGHQKEQQKEKESEAQSQAEALNPSKLIEALEILVNQLHSL |
| | | RNYYSHYKHKKPDAEKDIFKHLYKAFDASLRMVKEDYKAHFTVNLTR |
| | | DFAHLNRKGKNKQDNPDFNRYRFEKDGFFTESGLLFFTNLFLDKRD |
| | | AYWMLKKVSGFKASHKQREKMTTEVFCRSRILLPKLRLESRYDHNQ |
| | | MLLDMLSELSRCPKLLYEKLSEENKKHFQVEADGFLDEIEEEQNPFK |
| | | DTLIRHQDRFPYFALRYLDLNESFKSIRFQVDLGTYHYCIYDKKIGDEQ |
| | | EKRHLTRTLLSFGRLQDFTEINRPQEWKALTKDLDYKETSNQPFISKT |
| | | TPHYHITDNKIGFRLGTSKELYPSLEIKDGANRIAKYPYNSGFVAHAFI |
| | | SVHELLPLMFYQHLTGKSEDLLKETVRHIQRIYKDFEEERINTIEDLEK |
| | | ANQGRLPLGAFPKQMLGLLQNKQPDLSEKAKIKIEKLIAETKLLSHRL |
| | | NTKLKSSPKLGKRREKLIKTGVLADWLVKDFMRFQPVAYDAQNQPI |
| | | KSSKANSTEFWFIRRALALYGGEKNRLEGYFKQ.TNLIGNTNPHPFLN |
| | | KFNWKACRNLVDFYQQYLEQREKFLEAIKNQPWEPYQYCLLLKIPKE |
| | | NRKNLVKGWEQGGISLPRGLFTEAIRETLSEDLMLSKPIRKEIKKHGR |
| | | VGFISRAITLYFKEKYQDKHQSFYNLSYKLEAKAPLLKREEHYEYWQQ |
| | | NKPQSPTESQRLELHTSDRWKDYLLYKRWQHLEKKLRLYRNQDVM |
| | | LWLMTLELTKNHFKELNLNYHQLKLENLAVNVQEADAKLNPLNQTL |
| | | PMVLPVKVYPATAFGEVQYHKTPIRTVYIREEHTKALKMGNFKALVK |
| | | DRRLNGLFSFIKEENDTQKHPISQLRLRRELEIYQSLRVDAFKETLSLEE |
| | | KLLNKHTSLSSLENEFRALLEEWKKEYAASSMVTDEHIAFIASVRNAF |
| | | CHNQYPFYKEALHAPIPLFTVAQPTTEEKDGLGIAEALLKVLREYCEIV |
| | | KSOI |
| 241 | Cas13 | MEKPLPPNVYTLKHKFFWGAFLNIARHNAFITICHINEQLGLTTPPN |
| | | DDKIADVVCGTWNNILNNDHDLLKKSQLTELILKHFPFLAAMCYHP |
| | | PKKEGKKKGSQKEQQKEKENEAQSQAEALNPSELIKALKTLVKQLRT |
| | | LRNYYSHYKHKKPDAEKDIFKHLYKAFDASLRMVKEDYKAHFTVNLT |
| | | QDFAHLNRKGKNKQDNPKFDRYRFEKDGFFTESGLLFFTNLFLDKR |
| | | DAYWMLKKVSGFKASHKQSEKMTTEVFCRSRILLPKLRLESRYDHN |
| | | QMLLDMLSELSRCPKLLYEKLSEKDKKHFQVEADGFLDEIEEEQNPF |
| | | KDALIRHQDRFPYFALRYLDLNESFKSIRFQVDLGTYHYCIYDKKIGDE |
| | | QEKRHLTRTLLSFGRLQDFTEINRPQEWKALTKDLDYKETSKQPFISK |
| | | TTPHYHITDNKIGFRLGTSKELYPSLEVKDGANRIAKYPYNSDFVAHA |
| | | FISVHELLPLMFYQHLTGKSEDLLKETVRHIQRIYKDFEEERINTIEDLE |
| | | KANQGRLPLGAFPKQMLGLLQNKQPDLSEKAKIKIEKLIAETKLLSHR |
| | | LNTKLKSSPKLGKRREKLIKTGVLADWLVKDFMRFQPVAYDVQNQP |
| | | IESSKANSTEFQLIQRALALYGGEKNRLEGYFKQTNLIGNTNPHPFLN |
| | | KFNWKACRNLVDFYQQYLEQREKFLEAIKNQPWEPYQYCLLLKIPKE |
| | | NRKNLVKGWEQGGISLPRGLFTEAIRETLSEDLTLSKPIRKEIKKHGRV |
| | | GFISRAITLYFRERYQDDHQSFYNLPYELEAKASTPKPPLPKKREYVLR |
| | | AEHYEYWQQNKPQSPTELQRLELHTSDRWKDYLLYKRWQHLEKKL |
| | | RLYRNQDVMLWLMTLELTKNHFKELKLNYHQLKLENLAVNVQEAD |
| | | AKLNPLNQTLPMVLPVKVYPATAFGEVQYQETPIRTVYIREEQTKAL |
| | | KMGNFKALVKDRRLNGLFSFIKEENDTQKHPISQLRLRRELEIYQSLR |
| | | VDAFKETLSLEEKLLNKHASLSSLENEFRTLLEEWKKKYAASSMVTDE |
| | | HIAFIASVRNAFCHNQYPFYKETLHAPILLFTVAQPTTEEKDGLGIAEA |
| | | LLRVLREYCEIVKSQI |
| 242 | Cas13 | MEKPLLPNVYTLKHKFFWGAFLNIARHNAFITICHINEQLGLKTPSN |
| | | DDKIVDWCETWNNILNNDHDLLKKSQLTELILKHFPFLTAMCYHPP |
| | | KKEGKKKGHQKEQQKEKESEAQSQAEALNPSKLIEALEILVNQLHSL |
| | | RNYYSHYKHKKPDAEKDIFKHLYKAFDASLRMVKEDYKAHFTVNLTR |
| | | DFAHLNRKGKNKQDNPDFNRYRFEKDGFFTESGLLFFTNLFLDKRD |
| | | AYWMLKKVSGFKASHKQREKMTTEVFCRSRILLPKLRLESRYDHNQ |
| | | MLLDMLSELSRCPKLLYEKLSEENKKHFQVEADGFLDEIEEEQNPFK |
| | | DTLIRHQDRFPYFALRYLDLNESFKSIRFQVDLGTYHYCIYDKKIGDEQ |
| | | EKRHLTRTLLSFGRLQDFTEINRPQEWKALTKDLDYKETSNQPFISKT |
| | | TPHYHITDNKIGFRLGTSKELYPSLEIKDGANRIAKYPYNSGFVAHAFI |
| | | SVHELLPLMFYQHLTGKSEDLLKETVRHIQRIYKDFEEERINTIEDLEK |
| | | ANQGRLPLGAFPKQMLGLLQNKQPDLSEKAKIKIEKLIAETKLLSHRL |
| | | NTKLKSSPKLGKRREKLIKTGVLADWLVKDFMRFQPVAYDAQNQPI |
| | | KSSKANSTEFWFIRRALALYGGEKNRLEGYFKQTNLIGNTNPHPFLN |
| | | KFNWKACRNLVDFYQQYLEQREKFLEAIKNQPWEPYQYCLLLKIPKE |
| | | NRKNLVKGWEQGGISLPRGLFTEAIRETLSEDLMLSKPIRKEIKKHGR |
| | | VGFISRAITLYFKEKYQDKHQSFYNLSYKLEAKAPLLKREEHYEYWQQ |
| | | NKPQSPTESQRLELHTSDRWKDYLLYKRWQHLEKKLRLYRNQDVM |
| | | LWLMTLELTKNHFKELNLNYHQLKLENLAVNVQEADAKLNPLNQTL |
| | | PMVLPVKVYPATAFGEVQYHKTPIRTVYIREEHTKALKMGNFKALVK |
| | | DRRLNGLFSFIKEENDTQKHPISQLRLRRELEIYQSLRVDAFKETLSLEE |
| | | KLLNKHTSLSSLENEFRALLEEWKKEYAASSMVTDEHIAFIASVRNAF |
| | | CHNQYPFYKEALHAPIPLFTVAQPTTEEKDGLGIAEALLKVLREYCEIV |
| | | KSOI |
| 243 | Cas13 | MEKPLLPNVYTLKHKFFWGAFLNIARHNAFITICHINEQLGLKTPSN |
| | | DDKIVDVVCETWNNILNNDHDLLKKSQLTELILKHFPFLTAMCYHPP |
| | | KKEGKKKGHQKEQQKEKESEAQSQAEALNPSKLIEALEILVNQLHSL |
| | | RNYYSHYKHKKPDAEKDIFKHLYKAFDASLRMVKEDYKAHFTVNLTR |
| | | DFAHLNRKGKNKQDNPDFNRYRFEKDGFFTESGLLFFTNLFLDKRD |
| | | AYWMLKKVSGFKASHKQREKMTTEVFCRSRILLPKLRLESRYDHNQ |
| | | MLLDMLSELSRCPKLLYEKLSEENKKHFQVEADGFLDEIEEEQNPFK |
| | | DTLIRHQDRFPYFALRYLDLNESFKSIRFQVDLGTYHYCIYDKKIGDEQ |
| | | EKRHLTRTLLSFGRLQDFTEINRPQEWKALTKDLDYKETSNQPFISKT |
| | | TPHYHITDNKIGFRLGTSKELYPSLEIKDGANRIAKYPYNSGFVAHAFI |
| | | SVHELLPLMFYQHLTGKSEDLLKETVRHIQRIYKDFEEERINTIEDLEK |
| | | ANQGRLPLGAFPKQMLGLLQNKQPDLSEKAKIKIEKLIAETKLLSHRL |
| | | NTKLKSSPKLGKRREKLIKTGVLADWLVKDFMRFQPVAYDAQNQPI |
| | | KSSKANSTEFWFIRRALALYGGEKNRLEGYFKQTNLIGNTNPHPFLN |
| | | KFNWKACRNLVDFYQQYLEQREKFLEAIKNQPWEPYQYCLLLKIPKE |
| | | NRKNLVKGWEQGGISLPRGLFTEAIRETLSEDLMLSKPIRKEIKKHGR |
| | | VGFISRAITLYFKEKYQDKHQSFYNLSYKLEAKAPLLKREEHYEYWQQ |
| | | NKPQSPTESQRLELHTSDRWKDYLLYKRWQHLEKKLRLYRNQDVM |
| | | LWLMTLELTKNHFKELNLNYHQLKLENLAVNVQEADAKLNPLNQTL |
| | | PMVLPVKVYPATAFGEVQYHKTPIRTVYIREEHTKALKMGNFKALVK |
| | | DRRLNGLFSFIKEENDTQKHPISQLRLRRELEIYQSLRVDAFKETLSLEE |
| | | KLLNKHTSLSSLENEFRALLEEWKKEYAASSMVTDEHIAFIASVRNAF |
| | | CHNQYPFYKEALHAPIPLFTVAQPTTEEKDGLGIAEALLKVLREYCEIV |
| | | KSOI |
| 244 | Cas13 | MEKPLLPNVYTLKHKFFWGAFLNIARHNAFITICHINEQLGLKTPSN |
| | | DDKIVDVVCETWNNILNNDHDLLKKSQLTELILKHFPFLTAMCYHPP |
| | | KKEGKKKGHQKEQQKEKESEAQSQAEALNPSKLIEALEILVNQLHSL |
| | | RNYYSHYKHKKPDAEKDIFKHLYKAFDASLRMVKEDYKAHFTVNLTR |
| | | DFAHLNRKGKNKQDNPDFNRYRFEKDGFFTESGLLFFTNLFLDKRD |
| | | AYWMLKKVSGFKASHKQREKMTTEVFCRSRILLPKLRLESRYDHNQ |
| | | MLLDMLSELSRCPKLLYEKLSEENKKHFQVEADGFLDEIEEEQNPFK |
| | | DTLIRHQDRFPYFALRYLDLNESFKSIRFQVDLGTYHYCIYDKKIGDEQ |
| | | EKRHLTRTLLSFGRLQDFTEINRPQEWKALTKDLDYKETSNQPFISKT |
| | | TPHYHITDNKIGFRLGTSKELYPSLEIKDGANRIAKYPYNSGFVAHAFI |
| | | SVHELLPLMFYQHLTGKSEDLLKETVRHIQRIYKDFEEERINTIEDLEK |
| | | ANQGRLPLGAFPKQMLGLLQNKQPDLSEKAKIKIEKLIAETKLLSHRL |
| | | NTKLKSSPKLGKRREKLIKTGVLADWLVKDFMRFQPVAYDAQNQPI |
| | | KSSKANSTEFWFIRRALALYGGEKNRLEGYFKQTNLIGNTNPHPFLN |
| | | KFNWKACRNLVDFYQQYLEQREKFLEAIKNQPWEPYQYCLLLKIPKE |
| | | NRKNLVKGWEQGGISLPRGLFTEAIRETLSEDLMLSKPIRKEIKKHGR |
| | | VGFISRAITLYFKEKYQDKHQSFYNLSYKLEAKAPLLKREEHYEYWQO |
| | | NKPQSPTESQRLELHTSDRWKDYLLYKRWQHLEKKLRLYRNQDVM |
| | | LWLMTLELTKNHFKELNLNYHQLKLENLAVNVQEADAKLNPLNQTL |
| | | PMVLPVKVYPATAFGEVQYHKTPIRTVYIREEHTKALKMGNFKALVK |
| | | DRRLNGLFSFIKEENDTQKHPISQLRLRRELEIYQSLRVDAFKETLSLEE |
| | | KLLNKHTSLSSLENEFRALLEEWKKEYAASSMVTDEHIAFIASVRNAF |
| | | CHNQYPFYKEALHAPIPLFTVAQPTTEEKDGLGIAEALLKVLREYCEIV |
| | | KSQI |
| 245 | Cas13 | MFFSFHNAQRVIFKHLYKAFDASLRMVKEDYKAHFTVNLTRDFAHL |
| | | NRKGKNKQDNPDFNRYRFEKDGFFTESGLLFFTNLFLDKRDAYWM |
| | | LKKVSGFKASHKQREKMTTEVFCRSRILLPKLRLESRYDHNQMLLD |
| | | MLSELSRCPKLLYEKLSEENKKHFQVEADGFLDEIEEEQNPFKDTLIR |
| | | HQDRFPYFALRYLDLNESFKSIRFQVDLGTYHYCIYDKKIGDEQEKRH |
| | | LTRTLLSFGRLQDFTEINRPQEWKALTKDLDYKETSNQPFISKTTPHY |
| | | HITDNKIGFRLGTSKELYPSLEIKDGANRIAKYPYNSGFVAHAFISVHE |
| | | LLPLMFYQHLTGKSEDLLKETVRHIQRIYKDFEEERINTIEDLEKANQG |
| | | RLPLGAFPKQMLGLLQNKQPDLSEKAKIKIEKLIAETKLLSHRLNTKLK |
| | | SSPKLGKRREKLIKTGVLADWLVKDFMRFQPVAYDAQNQPIKSSKA |
| | | NSTEFWFIRRALALYGGEKNRLEGYFKQ.TNLIGNTNPHPFLNKFNW |
| | | KACRNLVDFYQQYLEQREKFLEAIKNQPWEPYQYCLLLKIPKENRKN |
| | | LVKGWEQGGISLPRGLFTEAIRETLSEDLMLSKPIRKEIKKHGRVGFIS |
| | | RAITLYFKEKYQDKHQSFYNLSYKLEAKAPLLKREEHYEYWQQNKPQ |
| | | SPTESQRLELHTSDRWKDYLLYKRWQHLEKKLRLYRNQDVMLWLM |
| | | TLELTKNHFKELNLNYHQLKLENLAVNVQEADAKLNPLNQTLPMVL |
| | | PVKVYPATAFGEVQYHKTPIRTVYIREEHTKALKMGNFKALVKDRRL |
| | | NGLFSFIKEENDTQKHPISQLRLRRELEIYQSLRVDAFKETLSLEEKLLN |
| | | KHTSLSSLENEFRALLEEWKKEYAASSMVTDEHIAFIASVRNAFCHN |
| | | QYPFYKEALHAPIPLFTVAQPTTEEKDGLGIAEALLKVLREYCEIVKSQI |
| 246 | Cas13 | MDTPNFSERIPVSLQSHPYYFAHYLNMARHNAYVILEYVNRELIKPG |
| | | KNLDEDNLIQSTVLKDGYFDRKPDELSHRNRLLVQHFPFLREAENEG |
| | | ARTCNPVSYKLKTALAALNQWRNNASHYPLNQNHEKDFDLQPFFS |
| | | FAIEACKKRMREVFQPDDFYLLETNEKQFYTLHNENGFTEKGLYCFIC |
| | | FFLEKKYAFQFLAGIKGFKNTTDNKFRATLETFTEHCCRLPKPKLDSS |
| | | DIKLDMLGELSRCPAPLFDLLDIEERKKFIREPEEVKPDESGDREEVQ |
| | | QVLMKRYDDRFPYFALRYFEEKNLLKGISFHIHIGRWIKSEHTKKIMG |
| | | AERDRRLLKDIRTFGELKEFSPEHAPDYWLRDGITPDDVDQFSPQYR |
| | | IVGNRIGIKLNYNGHNRWSVPDKEINVKPDAIISTYEFLNLFLYEHLY |
| | | QKKLTGLSPAEFIQDYLDRFNNFLSEFKAGHIRPVGDFSLEKRRGQG |
| | | DEPDLTARRKSLQKELDRFVLKGKDLPDKIREYLLGYKQKSEKKQAK |
| | | WILGGMIKETVYWRNKAEQSPEKMRSGDMAQQLARDIIFLTPPHT |
| | | VKEHKQKLNSLEYDVLQYALAYFSSNREKLYSFFKEHQLTVKGDRAH |
| | | PFLYKIRLDECQGILDFFIVYMQQKEKWLGWLDRNLKSPRLNEEEFF |
| | | NTYSYFIKTDTKRAIEMDYESCPNYLPRGIFNEPIAKALQKAGVKIKDE |
| | | DNASYALSVYSNGKTQPFYNKERYYNKGIFRMEELPEKLQPKELLGKI |
| | | QWTIKSSGKDTEEFRSLQNLKNRILNTEKEIRYVQSTDRALWIMVAD |
| | | LFPETFELRPDDLECIGHDLSDDLLSRPYQMKEKVYNYTITDYLPIKRY |
| | | GEFRRFLKDRRLENLLTYFEEGVPLHREALVAELEAYDLQRKNLLEIIY |
| | | RFEKLVFDRHRHELTFSGEGENQYVNHWDYLDFVARKYGLSAEVKE |
| | | LNSERFTELRNKMLHNQIPYQLWIKEAIAAREENTVCGRIMGMIGEI |
| | | YERMTTEIEKOMOV |
| 247 | Cas13 | MTEQNEKPYNGTYYTLEDKHFWAAFLNLARHNAYITLTHIDRQLAY |
| | | SKADITNDEDILFFKGQWKNLDNDLERKARLRSLILKHFFFLEGAAYG |
| | | KKLFESQSSGNKSSKKKELTKKEKEELQANALSLDNLKSILFDFLQKLK |
| | | DFRNYYSHYRHPESSELPLFDGNMLQRLYNVFDVSVQRVKRDHEH |
| | | NDKVDPHRHFNHLVRKGKKDKYGNNDNPFFKHHFVDREGKVTEA |
| | | GLLFFVSLFLEKRDAIWMQKKIRGFKGGTETYQQMTNEVFCRSRISL |
| | | PKLKLESLRTDDWMLLDMLNELVRCPKSLYDRLREEDRARFRVPVDI |
| | | LSDEDDTDGAEEDPFKNTLVRHQDRFPYFALRYFDLKKVFTSLRFHID |
| | | LGTYHFAIYKKNIGEQPEDRHLTRNLYGFGRIQDFAEEHRPEEWKRL |
| | | VRDLDYFETGDKPYITQTTPHYHIEKGKIGLRFVPEGQHLWPSPEVG |
| | | ATRTGRSKYAQDKRFTAEAFLSVHELMPMMFYYFLLREKYSEEASAE |
| | | RVQGRIKRVIEDVYAVYDAFARDEINTRDELDACLADKGIRRGHLPR |
| | | QMIAILSQKHKDMEEKVRKKLQEMIADTDHRLDMLDRQTDRKIRIG |
| | | RKNAGLPKSGVIADWLVRDMMRFQPVAKDTSGKPLNNSKANSTE |
| | | YRMLQRALALFGGEKERLTPYFRQMNLTGGNNPHPFLHETRWESH |
| | | TNILSFYRSYLKARKAFLQSIGRSDRVENHRFLLLKEPKTDRQTLVAG |
| | | WKGEFHLPRGIFTEAVRDCLIEMGLDEVRSYKEVGFMAKAVPLYFE |
| | | RASKDRVQPFYDYPFNVGNSLKPKKGRFLSKEKRAEEWESGKERFR |
| | | DLEAWSHSAARRIEDAFAGIENASRENKKKIEQLLQDLSLWETFESKL |
| | | KVKADKINIAKLKKEILEAKEHPYLDFKSWQKFERELRLVKNQDIITW |
| | | MMCRDLMEENKVEGLDTGTLYLKDIRTDVQEQGSLNVLNHVKPM |
| | | RLPVVVYRADSRGHVHKEQAPLATVYIEERDTKLLKQGNFKSFVKDR |
| | | RLNGLFSFVDTGGLAMEQYPISKLRVEYELAKYQTARVCAFEQTLELE |
| | | ESLLTRYPHLPDKNFRKMLESWSDPLLAKWPELHEKVRLLIAVRNAF |
| | | SHNQYPMYDEAVFSPIRKYDPSSPDAIEERMRLNIAHRLSEEVKQAK |
| | | ETVERIIQA |
| 248 | Cas13 | MDTPNFSERIPVSLQSHPYYFAHYLNMARHNAYVILEYVNRELIKPG |
| | | KNLDEDNLIQSTVLKDGYFDRKPDELSHRNRLLVQHFPFLREAENEG |
| | | ARTCNPVSYKLKTALAALNQWRNNASHYPLNQNHEKDFDLQPFFS |
| | | FAIEACKKRMREVFQPDDFYLLETNEKQFYTLHNENGFTEKGLYCFIC |
| | | FFLEKKYAFQFLAGIKGFKNTTDNKFRATLETFTEHCCRLPKPKLDSS |
| | | DIKLDMLGELSRCPAPLFDLLDIEERKKFIREPEEVKPDESGDREEVQ |
| | | QVLMKRYDDRFPYFALRYFEEKNLLKGISFHIHIGRWIKSEHTKKIMG |
| | | AERDRRLLKDIRTFGELKEFSPEHAPDYWLRDGITPDDVDQFSPQYR |
| | | IVGNRIGIKLNYNGHNRWSVPDKEINVKPDAIISTYEFLNLFLYEHLY |
| | | QKKLTGLSPAEFIQDYLDRFNNFLSEFKAGHIRPVGDFSLEKRRGQG |
| | | DEPDLTARRKSLQKELDRFVLKGKDLPDKIREYLLGYKQKSEKKQAK |
| | | WILGGMIKETVYWRNKAEQSPEKMRSGDMAQQLARDIIFLTPPHT |
| | | VKEHKQKLNSLEYDVLQYALAYFSSNREKLYSFFKEHQLTVKGDRAH |
| | | PFLYKIRLDECQGILDFFIVYMQQKEKWLGWLDRNLKSPRLNEEEFF |
| | | NTYSYFIKTDTKRAIEMDYESCPNYLPRGIFNEPIAKALQKAGVKIKDE |
| | | DNASYALSVYSNGKTQPFYNKERYYNKGIFRMEELPEKLQPKELLGKI |
| | | QWTIKSSGKDTEEFRSLQNLKNRILNTEKEIRYVQSTDRALWIMVAD |
| | | LFPETFELRPDDLECIGHDLSDDLLSRPYQMKEKVYNYTITDYLPIKRY |
| | | GEFRRFLKDRRLENLLTYFEEGVPLHREALVAELEAYDLQRKNLLEIIY |
| | | RFEKLVFDRHRHELTFSGEGENQYVNHWDYLDFVARKYGLSAEVKE |
| | | LNSERFTELRNKMLHNQIPYQLWIKEAIAAREENTVCGRIMGMIGEI |
| | | YERMTTEIEKOMOV |
| 249 | Cas13 | MGAIENKHIFAAYANLAIDGLIKTLNFIAKKLDTQKQLSSWDIKHVITL |
| | | IDSIFDQNPQNNLEQVVEGYLPWIKPIIEMKTPKKGERQSDKLCIEYK |
| | | TIITAFASLLNDVRNYYTHYYHDPICIYPGGYDIPSSLNCIYDSAINIIKE |
| | | RFQAEEKEMEHLRRYTRKKGRVVLKTEDDHFYYTLANNNDLSEKGY |
| | | AFFISMFLERKYSYLFLKKLSGFKRGDSLQYRLTLEVFTALSTKPPVERL |
| | | RTTKDTKQDRALDILNELSRIPIELYQTLEPKYREMYNATLQPTDAED |
| | | PYGLPDRSRIRFRSRFEAFALHFLDKQADFKEIGFYTYLGNYFHNGYQ |
| | | KTRVDRETKDRYINFQLAGFCKNIQDISAKKLSEALNVKSIDISTDSIP |
| | | DINSFEPYLVQSTPHYIVNGNNIGIKVLPEGKDTYPTIDEKGAKMPIA |
| | | DFWLSKYELPAMLFYTYLRNNNIHKSHCPLSVKDIIERSIHKSTKOKH |
| | | PEERSELMLRRVMKAIFWTDSKLNEVERIKSQKSAFGKRQHEILKAG |
| | | RIAETLVRDMLWLQPSKNNGRDKVTEPNFQAIQVSLAYFGIRRNDL |
| | | TEIFTRAGLINSSNPHPFLAQIGTNYTSLIEFYIAYLKERKVYFSRIOKKI |
| | | LQGKLNIQCHPLRDLQREPNKPQEKEEAIFLPRGLFNEAIINCLKKSKL |
| | | KQLIESPTREKSPALNVSYLILNYFRTYFEDQSQEFYAQPRNYRLFDKL |
| | | SPNKGKSKSYLSLEQRIKKMEELRPSKIPVAEANKLLEKEDRLYRKNY |
| | | NEICDNESIIRLYQIQDILLFMMTKEYLPSDLYNRINKYKLENVKGILN |
| | | ERVSYLIDLNPLKIQGEDIKIKDYGKLFYIHHDTRINSLNKVLSKVKRN |
| | | NSISSSVKIQPYENYKRECLDFEEAQIQIIPIIHSFEIAMVSMFPDLKKA |
| | | TPGNYYDFNELITEYEKRTKQKIDSSFLIKTRNMFLHDKYEAECIKEIS |
| | | DDFVYAKKIIAEFKMKIENIKLEDFSNDSSA |
| 250 | Cas13 | MEKPLPPNVYTLKHKFFWGAFLNIARHNAFITICHINEQLGLTTPPN |
| | | DDKIADVVCGTWNNILNNDHDLLKKSQLTELILKHFPFLAAMCYHP |
| | | PKKEGKKKGSQKEQQKEKENEAQSQAEALNPSELIKALKTLVKQLRT |
| | | LRNYYSHYKHKKPDAEKDIFKHLYKAFDASLRMVKEDYKAHFTVNLT |
| | | QDFAHLNRKGKNKQDNPKFDRYRFEKDGFFTESGLLFFTNLFLDKR |
| | | DAYWMLKKVSGFKASHKQSEKMTTEVFCRSRILLPKLRLESRYDHN |
| | | QMLLDMLSELSRCPKLLYEKLSEKDKKHFQVEADGFLDEIEEEQNPF |
| | | KDALIRHQDRFPYFALRYLDLNESFKSIRFQVDLGTYHYCIYDKKIGDE |
| | | QEKRHLTRTLLSFGRLQDFTEINRPQEWKALTKDLDYKETSKQPFISK |
| | | TTPHYHITDNKIGFRLGTSKELYPSLEVKDGANRIAKYPYNSDFVAHA |
| | | FISVHELLPLMFYQHLTGKSEDLLKETVRHIQRIYKDFEEERINTIEDLE |
| | | KANQGRLPLGAFPKQMLGLLQNKQPDLSEKAKIKIEKLIAETKLLSHR |
| | | LNTKLKSSPKLGKRREKLIKTGVLADWLVKDFMRFQPVAYDVQNQP |
| | | IESSKANSTEFQLIQRALALYGGEKNRLEGYFKQTNLIGNTNPHPFLN |
| | | KFNWKACRNLVDFYQQYLEQREKFLEAIKNQPWEPYQYCLLLKIPKE |
| | | NRKNLVKGWEQGGISLPRGLFTEAIRETLSEDLTLSKPIRKEIKKHGRV |
| | | GFISRAITLYFRERYQDDHQSFYNLPYELEAKASTPKPPLPKKREYVLR |
| | | AEHYEYWQQNKPQSPTELQRLELHTSDRWKDYLLYKRWQHLEKKL |
| | | RLYRNQDVMLWLMTLELTKNHFKELKLNYHQLKLENLAVNVQEAD |
| | | AKLNPLNQTLPMVLPVKVYPATAFGEVQYQETPIRTVYIREEQTKAL |
| | | KMGNFKALVKDRRLNGLFSFIKEENDTQKHPISQLRLRRELEIYQSLR |
| | | VDAFKETLSLEEKLLNKHASLSSLENEFRTLLEEWKKKYAASSMVTDE |
| | | HIAFIASVRNAFCHNQYPFYKETLHAPILLFTVAQPTTEEKDGLGIAEA |
| | | LLRVLREYCEIVKSOI |
| 251 | Cas13 | MEKPLLPNVYTLKHKFFWGAFLNIARHNAFITICHINEQLGLKTPSN |
| | | DDKIVDVVCETWNNILNNDHDLLKKSQLTELILKHFPFLTAMCYHPP |
| | | KKEGKKKGHQKEQQKEKESEAQSQAEALNPSKLIEALEILVNQLHSL |
| | | RNYYSHYKHKKPDAEKDIFKHLYKAFDASLRMVKEDYKAHFTVNLTR |
| | | DFAHLNRKGKNKQDNPDFNRYRFEKDGFFTESGLLFFTNLFLDKRD |
| | | AYWMLKKVSGFKASHKQREKMTTEVFCRSRILLPKLRLESRYDHNQ |
| | | MLLDMLSELSRCPKLLYEKLSEENKKHFQVEADGFLDEIEEEQNPFK |
| | | DTLIRHQDRFPYFALRYLDLNESFKSIRFQVDLGTYHYCIYDKKIGDEQ |
| | | EKRHLTRTLLSFGRLQDFTEINRPQEWKALTKDLDYKETSNQPFISKT |
| | | TPHYHITDNKIGFRLGTSKELYPSLEIKDGANRIAKYPYNSGFVAHAFI |
| | | SVHELLPLMFYQHLTGKSEDLLKETVRHIQRIYKDFEEERINTIEDLEK |
| | | ANQGRLPLGAFPKQMLGLLQNKQPDLSEKAKIKIEKLIAETKLLSHRL |
| | | NTKLKSSPKLGKRREKLIKTGVLADWLVKDFMRFQPVAYDAQNQPI |
| | | KSSKANSTEFWFIRRALALYGGEKNRLEGYFKQTNLIGNTNPHPFLN |
| | | KFNWKACRNLVDFYQQYLEQREKFLEAIKNQPWEPYQYCLLLKIPKE |
| | | NRKNLVKGWEQGGISLPRGLFTEAIRETLSEDLMLSKPIRKEIKKHGR |
| | | VGFISRAITLYFKEKYQDKHQSFYNLSYKLEAKAPLLKREEHYEYWQO |
| | | NKPQSPTESQRLELHTSDRWKDYLLYKRWQHLEKKLRLYRNQDVM |
| | | LWLMTLELTKNHFKELNLNYHQLKLENLAVNVQEADAKLNPLNQTL |
| | | PMVLPVKVYPATAFGEVQYHKTPIRTVYIREEHTKALKMGNFKALVK |
| | | DRRLNGLFSFIKEENDTQKHPISQLRLRRELEIYQSLRVDAFKETLSLEE |
| | | KLLNKHTSLSSLENEFRALLEEWKKEYAASSMVTDEHIAFIASVRNAF |
| | | CHNQYPFYKEALHAPIPLFTVAQPTTEEKDGLGIAEALLKVLREYCEIV |
| | | KSOI |
| 252 | Cas13 | MEKPLLPNVYTLKHKFFWGAFLNIARHNAFITICHINEQLGLKTPSN |
| | | DDKIVDVVCETWNNILNNDHDLLKKSQLTELILKHFPFLTAMCYHPP |
| | | KKEGKKKGHQKEQQKEKESEAQSQAEALNPSKLIEALEILVNQLHSL |
| | | RNYYSHYKHKKPDAEKDIFKHLYKAFDASLRMVKEDYKAHFTVNLTR |
| | | DFAHLNRKGKNKQDNPDFNRYRFEKDGFFTESGLLFFTNLFLDKRD |
| | | AYWMLKKVSGFKASHKQREKMTTEVFCRSRILLPKLRLESRYDHNQ |
| | | MLLDMLSELSRCPKLLYEKLSEENKKHFQVEADGFLDEIEEEQNPFK |
| | | DTLIRHQDRFPYFALRYLDLNESFKSIRFQVDLGTYHYCIYDKKIGDEQ |
| | | EKRHLTRTLLSFGRLQDFTEINRPQEWKALTKDLDYKETSNQPFISKT |
| | | TPHYHITDNKIGFRLGTSKELYPSLEIKDGANRIAKYPYNSGFVAHAFI |
| | | SVHELLPLMFYQHLTGKSEDLLKETVRHIQRIYKDFEEERINTIEDLEK |
| | | ANQGRLPLGAFPKQMLGLLQNKQPDLSEKAKIKIEKLIAETKLLSHRL |
| | | NTKLKSSPKLGKRREKLIKTGVLADWLVKDFMRFQPVAYDAQNQPI |
| | | KSSKANSTEFWFIRRALALYGGEKNRLEGYFKQ.TNLIGNTNPHPFLN |
| | | KFNWKACRNLVDFYQQYLEQREKFLEAIKNQPWEPYQYCLLLKIPKE |
| | | NRKNLVKGWEQGGISLPRGLFTEAIRETLSEDLMLSKPIRKEIKKHGR |
| | | VGFISRAITLYFKEKYQDKHQSFYNLSYKLEAKAPLLKREEHYEYWQQ |
| | | NKPQSPTESQRLELHTSDRWKDYLLYKRWQHLEKKLRLYRNQDVM |
| | | LWLMTLELTKNHFKELNLNYHQLKLENLAVNVQEADAKLNPLNQTL |
| | | PMVLPVKVYPATAFGEVQYHKTPIRTVYIREEHTKALKMGNFKALVK |
| | | DRRLNGLFSFIKEENDTQKHPISQLRLRRELEIYQSLRVDAFKETLSLEE |
| | | KLLNKHTSLSSLENEFRALLEEWKKEYAASSMVTDEHIAFIASVRNAF |
| | | CHNQYPFYKEALHAPIPLFTVAQPTTEEKDGLGIAEALLKVLREYCEIV |
| | | KSQI |
| 253 | Cas13 | MFFSFHNAQRVIFKHLYKAFDASLRMVKEDYKAHFTVNLTRDFAHL |
| | | NRKGKNKQDNPDFNRYRFEKDGFFTESGLLFFTNLFLDKRDAYWM |
| | | LKKVSGFKASHKQREKMTTEVFCRSRILLPKLRLESRYDHNQMLLD |
| | | MLSELSRCPKLLYEKLSEENKKHFQVEADGFLDEIEEEQNPFKDTLIR |
| | | HQDRFPYFALRYLDLNESFKSIRFQVDLGTYHYCIYDKKIGDEQEKRH |
| | | LTRTLLSFGRLQDFTEINRPQEWKALTKDLDYKETSNQPFISKTTPHY |
| | | HITDNKIGFRLGTSKELYPSLEIKDGANRIAKYPYNSGFVAHAFISVHE |
| | | LLPLMFYQHLTGKSEDLLKETVRHIQRIYKDFEEERINTIEDLEKANQG |
| | | RLPLGAFPKQMLGLLQNKQPDLSEKAKIKIEKLIAETKLLSHRLNTKLK |
| | | SSPKLGKRREKLIKTGVLADWLVKDFMRFQPVAYDAQNQPIKSSKA |
| | | NSTEFWFIRRALALYGGEKNRLEGYFKQ.TNLIGNTNPHPFLNKFNW |
| | | KACRNLVDFYQQYLEQREKFLEAIKNQPWEPYQYCLLLKIPKENRKN |
| | | LVKGWEQGGISLPRGLFTEAIRETLSEDLMLSKPIRKEIKKHGRVGFIS |
| | | RAITLYFKEKYQDKHQSFYNLSYKLEAKAPLLKREEHYEYWQQNKPQ |
| | | SPTESQRLELHTSDRWKDYLLYKRWQHLEKKLRLYRNQDVMLWLM |
| | | TLELTKNHFKELNLNYHQLKLENLAVNVQEADAKLNPLNQTLPMVL |
| | | PVKVYPATAFGEVQYHKTPIRTVYIREEHTKALKMGNFKALVKDRRL |
| | | NGLFSFIKEENDTQKHPISQLRLRRELEIYQSLRVDAFKETLSLEEKLLN |
| | | KHTSLSSLENEFRALLEEWKKEYAASSMVTDEHIAFIASVRNAFCHN |
| | | QYPFYKEALHAPIPLFTVAQPTTEEKDGLGIAEALLKVLREYCEIVKSQI |
| 254 | Cas13 | MEKPLLPNVYTLKHKFFWGAFLNIARHNAFITICHINEQLGLKTPSN |
| | | DDKIVDVVCETWNNILNNDHDLLKKSQLTELILKHFPFLTAMCYHPP |
| | | KKEGKKKGHQKEQQKEKESEAQSQAEALNPSKLIEALEILVNQLHSL |
| | | RNYYSHYKHKKPDAEKDIFKHLYKAFDASLRMVKEDYKAHFTVNLTR |
| | | DFAHLNRKGKNKQDNPDFNRYRFEKDGFFTESGLLFFTNLFLDKRD |
| | | AYWMLKKVSGFKASHKQREKMTTEVFCRSRILLPKLRLESRYDHNQ |
| | | MLLDMLSELSRCPKLLYEKLSEENKKHFQVEADGFLDEIEEEQNPFK |
| | | DTLIRHQDRFPYFALRYLDLNESFKSIRFQVDLGTYHYCIYDKKIGDEQ |
| | | EKRHLTRTLLSFGRLQDFTEINRPQEWKALTKDLDYKETSNQPFISKT |
| | | TPHYHITDNKIGFRLGTSKELYPSLEIKDGANRIAKYPYNSGFVAHAFI |
| | | SVHELLPLMFYQHLTGKSEDLLKETVRHIQRIYKDFEEERINTIEDLEK |
| | | ANQGRLPLGAFPKQMLGLLQNKQPDLSEKAKIKIEKLIAETKLLSHRL |
| | | NTKLKSSPKLGKRREKLIKTGVLADWLVKDFMRFQPVAYDAQNQPI |
| | | KSSKANSTEFWFIRRALALYGGEKNRLEGYFKQTNLIGNTNPHPFLN |
| | | KFNWKACRNLVDFYQQYLEQREKFLEAIKNQPWEPYQYCLLLKIPKE |
| | | NRKNLVKGWEQGGISLPRGLFTEAIRETLSEDLMLSKPIRKEIKKHGR |
| | | VGFISRAITLYFKEKYQDKHQSFYNLSYKLEAKAPLLKREEHYEYWQQ |
| | | NKPQSPTESQRLELHTSDRWKDYLLYKRWQHLEKKLRLYRNQDVM |
| | | LWLMTLELTKNHFKELNLNYHQLKLENLAVNVQEADAKLNPLNQTL |
| | | PMVLPVKVYPATAFGEVQYHKTPIRTVYIREEHTKALKMGNFKALVK |
| | | DRRLNGLFSFIKEENDTQKHPISQLRLRRELEIYQSLRVDAFKETLSLEE |
| | | KLLNKHTSLSSLENEFRALLEEWKKEYAASSMVTDEHIAFIASVRNAF |
| | | CHNQYPFYKEALHAPIPLFTVAQPTTEEKDGLGIAEALLKVLREYCEIV |
| | | KSQI |
| 255 | Cas13 | MEKPLLPNVYTLKHKFFWGAFLNIARHNAFITICHINEQLGLKTPSN |
| | | DDKIVDVVCETWNNILNNDHDLLKKSQLTELILKHFPFLTAMCYHPP |
| | | KKEGKKKGHQKEQQKEKESEAQSQAEALNPSKLIEALEILVNQLHSL |
| | | RNYYSHYKHKKPDAEKDIFKHLYKAFDASLRMVKEDYKAHFTVNLTR |
| | | DFAHLNRKGKNKQDNPDFNRYRFEKDGFFTESGLLFFTNLFLDKRD |
| | | AYWMLKKVSGFKASHKQREKMTTEVFCRSRILLPKLRLESRYDHNQ |
| | | MLLDMLSELSRCPKLLYEKLSEENKKHFQVEADGFLDEIEEEQNPFK |
| | | DTLIRHQDRFPYFALRYLDLNESFKSIRFQVDLGTYHYCIYDKKIGDEQ |
| | | EKRHLTRTLLSFGRLQDFTEINRPQEWKALTKDLDYKETSNQPFISKT |
| | | TPHYHITDNKIGFRLGTSKELYPSLEIKDGANRIAKYPYNSGFVAHAFI |
| | | SVHELLPLMFYQHLTGKSEDLLKETVRHIQRIYKDFEEERINTIEDLEK |
| | | ANQGRLPLGAFPKQMLGLLQNKQPDLSEKAKIKIEKLIAETKLLSHRL |
| | | NTKLKSSPKLGKRREKLIKTGVLADWLVKDFMRFQPVAYDAQNQPI |
| | | KSSKANSTEFWFIRRALALYGGEKNRLEGYFKQ.TNLIGNTNPHPFLN |
| | | KFNWKACRNLVDFYQQYLEQREKFLEAIKNQPWEPYQYCLLLKIPKE |
| | | NRKNLVKGWEQGGISLPRGLFTEAIRETLSEDLMLSKPIRKEIKKHGR |
| | | VGFISRAITLYFKEKYQDKHQSFYNLSYKLEAKAPLLKREEHYEYWQQ |
| | | NKPQSPTESQRLELHTSDRWKDYLLYKRWQHLEKKLRLYRNQDVM |
| | | LWLMTLELTKNHFKELNLNYHQLKLENLAVNVQEADAKLNPLNQTL |
| | | PMVLPVKVYPATAFGEVQYHKTPIRTVYIREEHTKALKMGNFKALVK |
| | | DRRLNGLFSFIKEENDTQKHPISQLRLRRELEIYQSLRVDAFKETLSLEE |
| | | KLLNKHTSLSSLENEFRALLEEWKKEYAASSMVTDEHIAFIASVRNAF |
| | | CHNQYPFYKEALHAPIPLFTVAQPTTEEKDGLGIAEALLKVLREYCEIV |
| | | KSQI |
| 256 | Cas13 | MEKPLLPNVYTLKHKFFWGAFLNIARHNAFITICHINEQLGLKTPSN |
| | | DDKIVDVVCETWNNILNNDHDLLKKSQLTELILKHFPFLTAMCYHPP |
| | | KKEGKKKGHQKEQQKEKESEAQSQAEALNPSKLIEALEILVNQLHSL |
| | | RNYYSHYKHKKPDAEKDIFKHLYKAFDASLRMVKEDYKAHFTVNLTR |
| | | DFAHLNRKGKNKQDNPDFNRYRFEKDGFFTESGLLFFTNLFLDKRD |
| | | AYWMLKKVSGFKASHKQREKMTTEVFCRSRILLPKLRLESRYDHNQ |
| | | MLLDMLSELSRCPKLLYEKLSEENKKHFQVEADGFLDEIEEEQNPFK |
| | | DTLIRHQDRFPYFALRYLDLNESFKSIRFQVDLGTYHYCIYDKKIGDEQ |
| | | EKRHLTRTLLSFGRLQDFTEINRPQEWKALTKDLDYKETSNQPFISKT |
| | | TPHYHITDNKIGFRLGTSKELYPSLEIKDGANRIAKYPYNSGFVAHAFI |
| | | SVHELLPLMFYQHLTGKSEDLLKETVRHIQRIYKDFEEERINTIEDLEK |
| | | ANQGRLPLGAFPKQMLGLLQNKQPDLSEKAKIKIEKLIAETKLLSHRL |
| | | NTKLKSSPKLGKRREKLIKTGVLADWLVKDFMRFQPVAYDAQNQPI |
| | | KSSKANSTEFWFIRRALALYGGEKNRLEGYFKQTNLIGNTNPHPFLN |
| | | KFNWKACRNLVDFYQQYLEQREKFLEAIKNQPWEPYQYCLLLKIPKE |
| | | NRKNLVKGWEQGGISLPRGLFTEAIRETLSEDLMLSKPIRKEIKKHGR |
| | | VGFISRAITLYFKEKYQDKHQSFYNLSYKLEAKAPLLKREEHYEYWQO |
| | | NKPQSPTESQRLELHTSDRWKDYLLYKRWQHLEKKLRLYRNQDVM |
| | | LWLMTLELTKNHFKELNLNYHQLKLENLAVNVQEADAKLNPLNQTL |
| | | PMVLPVKVYPATAFGEVQYHKTPIRTVYIREEHTKALKMGNFKALVK |
| | | DRRLNGLFSFIKEENDTQKHPISQLRLRRELEIYQSLRVDAFKETLSLEE |
| | | KLLNKHTSLSSLENEFRALLEEWKKEYAASSMVTDEHIAFIASVRNAF |
| | | CHNQYPFYKEALHAPIPLFTVAQPTTEEKDGLGIAEALLKVLREYCEIV |
| | | KSOI |
| 257 | Cas13 | MDTPNFSERIPVSLQSHPYYFAHYLNMARHNAYVILEYVNRELIKPG |
| | | KNLDEDNLIQSTVLKDGYFDRKPDELSHRNRLLVQHFPFLREAENEG |
| | | ARTCNPVSYKLKTALAALNQWRNNASHYPLNQNHEKDFDLQPFFS |
| | | FAIEACKKRMREVFQPDDFYLLETNEKQFYTLHNENGFTEKGLYCFIC |
| | | FFLEKKYAFQFLAGIKGFKNTTDNKFRATLETFTEHCCRLPKPKLDSS |
| | | DIKLDMLGELSRCPAPLFDLLDIEERKKFIREPEEVKPDESGDREEVQ |
| | | QVLMKRYDDRFPYFALRYFEEKNLLKGISFHIHIGRWIKSEHTKKIMG |
| | | AERDRRLLKDIRTFGELKEFSPEHAPDYWLRDGITPDDVDQFSPQYR |
| | | IVGNRIGIKLNYNGHNRWSVPDKEINVKPDAIISTYEFLNLFLYEHLY |
| | | QKKLTGLSPAEFIQDYLDRFNNFLSEFKAGHIRPVGDFSLEKRRGQG |
| | | DEPDLTARRKSLQKELDRFVLKGKDLPDKIREYLLGYKQKSEKKQAK |
| | | WILGGMIKETVYWRNKAEQSPEKMRSGDMAQQLARDIIFLTPPHT |
| | | VKEHKQKLNSLEYDVLQYALAYFSSNREKLYSFFKEHQLTVKGDRAH |
| | | PFLYKIRLDECQGILDFFIVYMQQKEKWLGWLDRNLKSPRLNEEEFF |
| | | NTYSYFIKTDTKRAIEMDYESCPNYLPRGIFNEPIAKALQKAGVKIKDE |
| | | DNASYALSVYSNGKTQPFYNKERYYNKGIFRMEELPEKLQPKELLGKI |
| | | QWTIKSSGKDTEEFRSLQNLKNRILNTEKEIRYVQSTDRALWIMVAD |
| | | LFPETFELRPDDLECIGHDLSDDLLSRPYQMKEKVYNYTITDYLPIKRY |
| | | GEFRRFLKDRRLENLLTYFEEGVPLHREALVAELEAYDLQRKNLLEIIY |
| | | RFEKLVFDRHRHELTFSGEGENQYVNHWDYLDFVARKYGLSAEVKE |
| | | LNSERFTELRNKMLHNQIPYQLWIKEAIAAREENTVCGRIMGMIGEI |
| | | YERMTTEIEKOMOV |
| 258 | Cas13 | MFFSFHNAQRVIFKHLYKAFDASLRMVKEDYKAHFTVNLTRDFAHL |
| | | NRKGKNKQDNPDFNRYRFEKDGFFTESGLLFFTNLFLDKRDAYWM |
| | | LKKVSGFKASHKQREKMTTEVFCRSRILLPKLRLESRYDHNQMLLD |
| | | MLSELSRCPKLLYEKLSEENKKHFQVEADGFLDEIEEEQNPFKDTLIR |
| | | HQDRFPYFALRYLDLNESFKSIRFQVDLGTYHYCIYDKKIGDEQEKRH |
| | | LTRTLLSFGRLQDFTEINRPQEWKALTKDLDYKETSNQPFISKTTPHY |
| | | HITDNKIGFRLGTSKELYPSLEIKDGANRIAKYPYNSGFVAHAFISVHE |
| | | LLPLMFYQHLTGKSEDLLKETVRHIQRIYKDFEEERINTIEDLEKANQG |
| | | RLPLGAFPKQMLGLLQNKQPDLSEKAKIKIEKLIAETKLLSHRLNTKLK |
| | | SSPKLGKRREKLIKTGVLADWLVKDFMRFQPVAYDAQNQPIKSSKA |
| | | NSTEFWFIRRALALYGGEKNRLEGYFKQTNLIGNTNPHPFLNKFNW |
| | | KACRNLVDFYQQYLEQREKFLEAIKNQPWEPYQYCLLLKIPKENRKN |
| | | LVKGWEQGGISLPRGLFTEAIRETLSEDLMLSKPIRKEIKKHGRVGFIS |
| | | RAITLYFKEKYQDKHQSFYNLSYKLEAKAPLLKREEHYEYWQQNKPQ |
| | | SPTESQRLELHTSDRWKDYLLYKRWQHLEKKLRLYRNQDVMLWLM |
| | | TLELTKNHFKELNLNYHQLKLENLAVNVQEADAKLNPLNQTLPMVL |
| | | PVKVYPATAFGEVQYHKTPIRTVYIREEHTKALKMGNFKALVKDRRL |
| | | NGLFSFIKEENDTQKHPISQLRLRRELEIYQSLRVDAFKETLSLEEKLLN |
| | | KHTSLSSLENEFRALLEEWKKEYAASSMVTDEHIAFIASVRNAFCHN |
| | | QYPFYKEALHAPIPLFTVAQPTTEEKDGLGIAEALLKVLREYCEIVKSQI |
| 259 | Cas13 | MEKPLLPNVYTLKHKFFWGAFLNIARHNAFITICHINEQLGLKTPSN |
| | | DDKIVDVVCETWNNILNNDHDLLKKSQLTELILKHFPFLTAMCYHPP |
| | | KKEGKKKGHQKEQQKEKESEAQSQAEALNPSKLIEALEILVNQLHSL |
| | | RNYYSHYKHKKPDAEKDIFKHLYKAFDASLRMVKEDYKAHFTVNLTR |
| | | DFAHLNRKGKNKQDNPDFNRYRFEKDGFFTESGLLFFTNLFLDKRD |
| | | AYWMLKKVSGFKASHKQREKMTTEVFCRSRILLPKLRLESRYDHNQ. |
| | | MLLDMLSELSRCPKLLYEKLSEENKKHFQVEADGFLDEIEEEQNPFK |
| | | DTLIRHQDRFPYFALRYLDLNESFKSIRFQVDLGTYHYCIYDKKIGDEQ |
| | | EKRHLTRTLLSFGRLQDFTEINRPQEWKALTKDLDYKETSNQPFISKT |
| | | TPHYHITDNKIGFRLGTSKELYPSLEIKDGANRIAKYPYNSGFVAHAFI |
| | | SVHELLPLMFYQHLTGKSEDLLKETVRHIQRIYKDFEEERINTIEDLEK |
| | | ANQGRLPLGAFPKQMLGLLQNKQPDLSEKAKIKIEKLIAETKLLSHRL |
| | | NTKLKSSPKLGKRREKLIKTGVLADWLVKDFMRFQPVAYDAQNQPI |
| | | KSSKANSTEFWFIRRALALYGGEKNRLEGYFKQTNLIGNTNPHPFLN |
| | | KFNWKACRNLVDFYQQYLEQREKFLEAIKNQPWEPYQYCLLLKIPKE |
| | | NRKNLVKGWEQGGISLPRGLFTEAIRETLSEDLMLSKPIRKEIKKHGR |
| | | VGFISRAITLYFKEKYQDKHQSFYNLSYKLEAKAPLLKREEHYEYWQO |
| | | NKPQSPTESQRLELHTSDRWKDYLLYKRWQHLEKKLRLYRNQDVM |
| | | LWLMTLELTKNHFKELNLNYHQLKLENLAVNVQEADAKLNPLNQTL |
| | | PMVLPVKVYPATAFGEVQYHKTPIRTVYIREEHTKALKMGNFKALVK |
| | | DRRLNGLFSFIKEENDTQKHPISQLRLRRELEIYQSLRVDAFKETLSLEE |
| | | KLLNKHTSLSSLENEFRALLEEWKKEYAASSMVTDEHIAFIASVRNAF |
| | | CHNQYPFYKEALHAPIPLFTVAQPTTEEKDGLGIAEALLKVLREYCEIV |
| | | KSQI |
| 260 | Cas13 | MTNTPKRRTLHRHPSYFGAFLNIARHNAFMIMEHLSTKYDMEDKN |
| | | TLDEAQLPNAKLFGCLKKRYGKPDVTEGVSRDLRRYFPFLNYPLFLHL |
| | | EKQQNAEQAATYDINPEDIEFTLKGFFRLLNQMRNNYSHYISNTDY |
| | | GKFDKLPVQDIYEAAIFRLLDRGKHTKRFDVFESKHTRHLESNNSEYR |
| | | PRSLANSPDHENTVAFVTCLFLERKYAFPFLSRLDCFRSTNDAAEGD |
| | | PLIRKASHECYTMFCCRLPQPKLESSDILLDMVNELGRCPSALYNLLS |
| | | EEDQARFHIKREEITGFEEDPDEELEQEIVLKRHSDRFPYFALRYFDDT |
| | | EAFQTLRFDVYLGRWRTKPVYKKRIYGQERDRVLTQSIRTFTRLSRLL |
| | | PIYENVKHDAVRQNEEDGKLVNPDVTSQFHKSWIQIESDDRAFLSD |
| | | RIEHFSPHYNFGDQVIGLKFINPDRYAAIQNVFPKLPGEEKKDKDAKL |
| | | VNETADAIISTHEIRSLFLYHYLSKKPISAGDERRFIQVDTETFIKQYIDT |
| | | IKLFFEDIKSGELQPIADPPNYQKNEPLPYVRGDKEKTQEERAQYRER |
| | | QKEIKERRKELNTLLQNRYGLSIQYIPSRLREYLLGYKKVPYEKLALQKL |
| | | RAQRKEVKKRIKDIEKMRTPRVGEQATWLAEDIVFLTPPKMHTPER |
| | | KTTKHPQKLNNDQFRIMQSSLAYFSVNKKAIKKFFQKETGIGLSNRE |
| | | TSHPFLYRIDVGRCRGILDFYTGYLKYKMDWLDDAIKKVDNRKHGK |
| | | KEAKKYEKYLPSSIQHKTPLELDYTRLPVYLPRGLFKKAIVKALAAHAD |
| | | FQVEPEEDNVIFCLDQLLDGDTQDFYNWQRYYRSALTEKETDNQLV |
| | | LAHPYAEQILGTIKTLEGKQKNNKLGNKAKQKIKDELIDLKRAKRRLL |
| | | DREQYLRAVQAEDRALWLMIQERQKQKAEHEEIAFDQLDLKNITKI |
| | | LTESIDARLRIPDTKVDITDKLPLRRYGDLRRVAKDRRLVNLASYYHV |
| | | AGLSEIPYDLVKKELEEYDRRRVAFFEHVYQFEKEVYDRYAAELRNEN |
| | | PKGESTYFSHWEYVAVAVKHSADTHFNELFKEKVMQLRNKFHHNE |
| | | FPYFDWLLPEVEKASAALYADRVFDVAEGYYQKMRKLMRQ |
| 261 | Cas13 | MTNTPKRRTLHRHPSYFGAFLNIARHNAFMIMEHLSTKYDMEDKN |
| | | TLDEAQLPNAKLFGCLKKRYGKPDVTEGVSRDLRRYFPFLNYPLFLHL |
| | | EKQQNAEQAATYDINPEDIEFTLKGFFRLLNQMRNNYSHYISNTDY |
| | | GKFDKLPVQDIYEAAIFRLLDRGKHTKRFDVFESKHTRHLESNNSEYR |
| | | PRSLANSPDHENTVAFVTCLFLERKYAFPFLSRLDCFRSTNDAAEGD |
| | | PLIRKASHECYTMFCCRLPQPKLESSDILLDMVNELGRCPSALYNLLS |
| | | EEDQARFHIKREEITGFEEDPDEELEQEIVLKRHSDRFPYFALRYFDDT |
| | | EAFQTLRFDVYLGRWRTKPVYKKRIYGQERDRVLTQSIRTFTRLSRLL |
| | | PIYENVKHDAVRQNEEDGKLVNPDVTSQFHKSWIQIESDDRAFLSD |
| | | RIEHFSPHYNFGDQVIGLKFINPDRYAAIQNVFPKLPGEEKKDKDAKL |
| | | VNETADAIISTHEIRSLFLYHYLSKKPISAGDERRFIQVDTETFIKQYIDT |
| | | IKLFFEDIKSGELQPIADPPNYQKNEPLPYVRGDKEKTQEERAQYRER |
| | | QKEIKERRKELNTLLQNRYGLSIQYIPSRLREYLLGYKKVPYEKLALOKL |
| | | RAQRKEVKKRIKDIEKMRTPRVGEQATWLAEDIVFLTPPKMHTPER |
| | | KTTKHPQKLNNDQFRIMQSSLAYFSVNKKAIKKFFQKETGIGLSNRE |
| | | TSHPFLYRIDVGRCRGILDFYTGYLKYKMDWLDDAIKKVDNRKHGK |
| | | KEAKKYEKYLPSSIQHKTPLELDYTRLPVYLPRGLFKKAIVKALAAHAD |
| | | FQVEPEEDNVIFCLDQLLDGDTQDFYNWQRYYRSALTEKETDNQLV |
| | | LAHPYAEQILGTIKTLEGKQKNNKLGNKAKQKIKDELIDLKRAKRRLL |
| | | DREQYLRAVQAEDRALWLMIQERQKQKAEHEEIAFDQLDLKNITKI |
| | | LTESIDARLRIPDTKVDITDKLPLRRYGDLRRVAKDRRLVNLASYYHV |
| | | AGLSEIPYDLVKKELEEYDRRRVAFFEHVYQFEKEVYDRYAAELRNEN |
| | | PKGESTYFSHWEYVAVAVKHSADTHFNELFKEKVMQLRNKFHHNE |
| | | FPYFDWLLPEVEKASAALYADRVFDVAEGYYQKMRKLMRQ |
| 262 | Cas13 | MEKPLLPNVYTLKHKFFWGAFLNIARHNAFITICHINEQLGLKTPSN |
| | | DDKIVDVVCETWNNILNNDHDLLKKSQLTELILKHFPFLTAMCYHPP |
| | | KKEGKKKGHQKEQQKEKESEAQSQAEALNPSKLIEALEILVNQLHSL |
| | | RNYYSHYKHKKPDAEKDIFKHLYKAFDASLRMVKEDYKAHFTVNLTR |
| | | DFAHLNRKGKNKQDNPDFNRYRFEKDGFFTESGLLFFTNLFLDKRD |
| | | AYWMLKKVSGFKASHKQREKMTTEVFCRSRILLPKLRLESRYDHNQ |
| | | MLLDMLSELSRCPKLLYEKLSEENKKHFQVEADGFLDEIEEEQNPFK |
| | | DTLIRHQDRFPYFALRYLDLNESFKSIRFQVDLGTYHYCIYDKKIGDEQ |
| | | EKRHLTRTLLSFGRLQDFTEINRPQEWKALTKDLDYKETSNQPFISKT |
| | | TPHYHITDNKIGFRLGTSKELYPSLEIKDGANRIAKYPYNSGFVAHAFI |
| | | SVHELLPLMFYQHLTGKSEDLLKETVRHIQRIYKDFEEERINTIEDLEK |
| | | ANQGRLPLGAFPKQMLGLLQNKQPDLSEKAKIKIEKLIAETKLLSHRL |
| | | NTKLKSSPKLGKRREKLIKTGVLADWLVKDFMRFQPVAYDAQNQPI |
| | | KSSKANSTEFWFIRRALALYGGEKNRLEGYFKQ.TNLIGNTNPHPFLN |
| | | KFNWKACRNLVDFYQQYLEQREKFLEAIKNQPWEPYQYCLLLKIPKE |
| | | NRKNLVKGWEQGGISLPRGLFTEAIRETLSEDLMLSKPIRKEIKKHGR |
| | | VGFISRAITLYFKEKYQDKHQSFYNLSYKLEAKAPLLKREEHYEYWQQ |
| | | NKPQSPTESQRLELHTSDRWKDYLLYKRWQHLEKKLRLYRNQDVM |
| | | LWLMTLELTKNHFKELNLNYHQLKLENLAVNVQEADAKLNPLNQTL |
| | | PMVLPVKVYPATAFGEVQYHKTPIRTVYIREEHTKALKMGNFKALVK |
| | | DRRLNGLFSFIKEENDTQKHPISQLRLRRELEIYQSLRVDAFKETLSLEE |
| | | KLLNKHTSLSSLENEFRALLEEWKKEYAASSMVTDEHIAFIASVRNAF |
| | | CHNQYPFYKEALHAPIPLFTVAQPTTEEKDGLGIAEALLKVLREYCEIV |
| | | KSQI |
| 263 | Cas13 | MEKPLLPNVYTLKHKFFWGAFLNIARHNAFITICHINEQLGLKTPSN |
| | | DDKIVDVVCETWNNILNNDHDLLKKSQLTELILKHFPFLTAMCYHPP |
| | | KKEGKKKGHQKEQQKEKESEAQSQAEALNPSKLIEALEILVNQLHSL |
| | | RNYYSHYKHKKPDAEKDIFKHLYKAFDASLRMVKEDYKAHFTVNLTR |
| | | DFAHLNRKGKNKQDNPDFNRYRFEKDGFFTESGLLFFTNLFLDKRD |
| | | AYWMLKKVSGFKASHKQREKMTTEVFCRSRILLPKLRLESRYDHNQ |
| | | MLLDMLSELSRCPKLLYEKLSEENKKHFQVEADGFLDEIEEEQNPFK |
| | | DTLIRHQDRFPYFALRYLDLNESFKSIRFQVDLGTYHYCIYDKKIGDEQ |
| | | EKRHLTRTLLSFGRLQDFTEINRPQEWKALTKDLDYKETSNQPFISKT |
| | | TPHYHITDNKIGFRLGTSKELYPSLEIKDGANRIAKYPYNSGFVAHAFI |
| | | SVHELLPLMFYQHLTGKSEDLLKETVRHIQRIYKDFEEERINTIEDLEK |
| | | ANQGRLPLGAFPKQMLGLLQNKQPDLSEKAKIKIEKLIAETKLLSHRL |
| | | NTKLKSSPKLGKRREKLIKTGVLADWLVKDFMRFQPVAYDAQNQPI |
| | | KSSKANSTEFWFIRRALALYGGEKNRLEGYFKQ.TNLIGNTNPHPFLN |
| | | KFNWKACRNLVDFYQQYLEQREKFLEAIKNQPWEPYQYCLLLKIPKE |
| | | NRKNLVKGWEQGGISLPRGLFTEAIRETLSEDLMLSKPIRKEIKKHGR |
| | | VGFISRAITLYFKEKYQDKHQSFYNLSYKLEAKAPLLKREEHYEYWQQ |
| | | NKPQSPTESQRLELHTSDRWKDYLLYKRWQHLEKKLRLYRNQDVM |
| | | LWLMTLELTKNHFKELNLNYHQLKLENLAVNVQEADAKLNPLNQTL |
| | | PMVLPVKVYPATAFGEVQYHKTPIRTVYIREEHTKALKMGNFKALVK |
| | | DRRLNGLFSFIKEENDTQKHPISQLRLRRELEIYQSLRVDAFKETLSLEE |
| | | KLLNKHTSLSSLENEFRALLEEWKKEYAASSMVTDEHIAFIASVRNAF |
| | | CHNQYPFYKEALHAPIPLFTVAQPTTEEKDGLGIAEALLKVLREYCEIV |
| | | KSQI |
| 264 | Cas13 | MEKPLLPNVYTLKHKFFWGAFLNIARHNAFITICHINEQLGLKTPSN |
| | | DDKIVDVVCETWNNILNNDHDLLKKSQLTELILKHFPFLTAMCYHPP |
| | | KKEGKKKGHQKEQQKEKESEAQSQAEALNPSKLIEALEILVNQLHSL |
| | | RNYYSHYKHKKPDAEKDIFKHLYKAFDASLRMVKEDYKAHFTVNLTR |
| | | DFAHLNRKGKNKQDNPDFNRYRFEKDGFFTESGLLFFTNLFLDKRD |
| | | AYWMLKKVSGFKASHKQREKMTTEVFCRSRILLPKLRLESRYDHNQ |
| | | MLLDMLSELSRCPKLLYEKLSEENKKHFQVEADGFLDEIEEEQNPFK |
| | | DTLIRHQDRFPYFALRYLDLNESFKSIRFQVDLGTYHYCIYDKKIGDEQ |
| | | EKRHLTRTLLSFGRLQDFTEINRPQEWKALTKDLDYKETSNQPFISKT |
| | | TPHYHITDNKIGFRLGTSKELYPSLEIKDGANRIAKYPYNSGFVAHAFI |
| | | SVHELLPLMFYQHLTGKSEDLLKETVRHIQRIYKDFEEERINTIEDLEK |
| | | ANQGRLPLGAFPKQMLGLLQNKQPDLSEKAKIKIEKLIAETKLLSHRL |
| | | NTKLKSSPKLGKRREKLIKTGVLADWLVKDFMRFQPVAYDAQNQPI |
| | | KSSKANSTEFWFIRRALALYGGEKNRLEGYFKQTNLIGNTNPHPFLN |
| | | KFNWKACRNLVDFYQQYLEQREKFLEAIKNQPWEPYQYCLLLKIPKE |
| | | NRKNLVKGWEQGGISLPRGLFTEAIRETLSEDLMLSKPIRKEIKKHGR |
| | | VGFISRAITLYFKEKYQDKHQSFYNLSYKLEAKAPLLKREEHYEYWQO |
| | | NKPQSPTESQRLELHTSDRWKDYLLYKRWQHLEKKLRLYRNQDVM |
| | | LWLMTLELTKNHFKELNLNYHQLKLENLAVNVQEADAKLNPLNQTL |
| | | PMVLPVKVYPATAFGEVQYHKTPIRTVYIREEHTKALKMGNFKALVK |
| | | DRRLNGLFSFIKEENDTQKHPISQLRLRRELEIYQSLRVDAFKETLSLEE |
| | | KLLNKHTSLSSLENEFRALLEEWKKEYAASSMVTDEHIAFIASVRNAF |
| | | CHNQYPFYKEALHAPIPLFTVAQPTTEEKDGLGIAEALLKVLREYCEIV |
| | | KSOI |
| 265 | Cas13 | MESIKNSQKSTGKTLQKDPPYFGLYLNMALLNVRKVENHIRKWLGD |
| | | VALLPEKSGFHSLLTTDNLSSAKWTRFYYKSRKFLPFLEMFDSDKKSY |
| | | ENRRETTECLDTIDRQKISSLLKEVYGKLQDIRNAFSHYHIDDQSVKH |
| | | TALIISSEMHRFIENAYSFALQKTRARFTGVFVETDFLQAEEKGDNKK |
| | | FFAIGGNEGIKLKDNALIFLICLFLDREEAFKFLSRATGFKSTKEKGFLA |
| | | VRETFCALCCRQPHERLLSVNPREALLMDMLNELNRCPDILFEMLD |
| | | EKDQKSFLPLLGEEEQAHILENSLNDELCEAIDDPFEMIASLSKRVRYK |
| | | NRFPYLMLRYIEEKNLLPFIRFRIDLGCLELASYPKKMGEENNYERSVT |
| | | DHAMAFGRLTDFHNEDAVLQQITKGITDEVRFSLYAPRYAIYNNKIG |
| | | FVRTGGSDKISFPTLKKKGGEGHCVAYTLQNTKSFGFISIYDLRKILLLS |
| | | FLDKDKAKNIVSGLLEQCEKHWKDLSENLFDAIRTELQKEFPVPLIRY |
| | | TLPRSKGGKLVSSKLADKQEKYESEFERRKEKLTEILSEKDFDLSQIPRR |
| | | MIDEWLNVLPTSREKKLKGYVETLKLDCRERLRVFEKREKGEHPVPP |
| | | RIGEMATDLAKDIIRMVIDQGVKQRITSAYYSEIQRCLAQYAGDDNR |
| | | RHLDSIIRELRLKDTKNGHPFLGKVLRPGLGHTEKLYQRYFEEKKEWL |
| | | EATFYPAASPKRVPRFVNPPTGKQKELPLIIRNLMKERPEWRDWKQ. |
| | | RKNSHPIDLPSQLFENEICRLLKDKIGKEPSGKLKWNEMFKLYWDKE |
| | | FPNGMQRFYRCKRRVEVFDKVVEYEYSEEGGNYKKYYEALIDEVVR |
| | | QKISSSKEKSKLQVEDLTLSVRRVFKRAINEKEYQLRLLCEDDRLLFMA |
| | | VRDLYDWKEAQLDLDKIDNMLGEPVSVSQVIQLEGGQPDAVIKAE |
| | | CKLKDVSKLMRYCYDGRVKGLMPYFANHEATQEQVEMELRHYED |
| | | HRRRVFNWVFALEKSVLKNEKLRRFYEESQGGCEHRRCIDALRKASL |
| | | VSEEEYEFLVHIRNKSAHNQFPDLEIGKLPPNVTSGFCECIWSKYKAII |
| | | CRIIPFIDPERRFFGKLLEOK |
| 266 | Cas13 | MEKPLPPNVYTLKHKFFWGAFLNIARHNAFITICHINEQLGLTTPPN |
| | | DDKIADVVCGTWNNILNNDHDLLKKSQLTELILKHFPFLAAMCYHP |
| | | PKKEGKKKGSQKEQQKEKEKEKENEAQSQAEALNPSELIKVLKTIVK |
| | | QLRTLRNYYSHHSHKKPDTEKDIFKHLYKAFDASLRMVKEDYKAHFT |
| | | VNLTRDFAHLNRKGKNKQDNPDFNRYRFEKDGFFTESGLLFFTNLFL |
| | | DKRDAYWMLKKVSGFKASHKQREKMTTEVFCRSHILLPKLRLESRY |
| | | DHNQMLLDMLSELSRCPKLLYEKLSEENKKHFQVEADGFLDEIEEEQ |
| | | NPFKDTLIRHQDRFPYFALRYLDLNESFKSIRFQVDLGTYHYCIYDKKI |
| | | GDEQEKRHLTRTLLSFGRLQDFTEINRPQEWKALTKDLDYKETSNQP |
| | | FISKTTPHYHITDNKIGFRLGTSKELYPSLEIKDGANRIAKYPYNSGFVA |
| | | HAFISVHELLPLMFYQHLTGKSEDLLKETVRHIQRIYKDFEEERINTIE |
| | | DLEKANQGRLPLGAFPKQMLGLLQNKQPDLSEKAKIKIEKLIAETKLL |
| | | SHRLNTKLKSSPKLGKRREKLIKTGVLADWLVKDFMRFQPVAYDAQ |
| | | NQPIKSSKANSTEFWFIRRALALYGGEKNRLEGYFKQTNLIGNTNPH |
| | | PFLNKFNWKACRNLVDFYQQYLEQREKFLEAIKNQPWEPYQYCLLL |
| | | KIPKENRKNLVKGWEQGGISLPRGLFTEAIRETLSEDLMLSKPIRKEIK |
| | | KHGRVGFISRAITLYFKEKYQDKHQSFYNLSYKLEAKAPLLKREEHYEY |
| | | WQQNKPQSPTESQRLELHTSDRWKDYLLYKRWQHLEKKLRLYRNQ |
| | | DIMLWLMTLELTKNHFKELNLNYHQLKLENLAVNVQEADAKLNPL |
| | | NQTLPMVLPVKVYPATAFGEVQYQETPIRTVYIREEHTKALKMGNF |
| | | KALVKDRRLNGLFSFIKEENDTQKHPISQLRLRRELEIYQSLRVDAFKE |
| | | TLDLEEKLLKKHTSLSSLENKFRILLEEWKKEYAASSMVTDEHIAFIAS |
| | | VRNAFCHNQYPFYEEALHAPIPLFTVAQQTTEEKDGLGIAEALLRVL |
| | | REYCEIVKSQI |
| 267 | Cas13 | MFFSFHNAQRVIFKHLYKAFDASLRMVKEDYKAHFTVNLTRDFAHL |
| | | NRKGKNKQDNPDFNRYRFEKDGFFTESGLLFFTNLFLDKRDAYWM |
| | | LKKVSGFKASHKQREKMTTEVFCRSRILLPKLRLESRYDHNQMLLD |
| | | MLSELSRCPKLLYEKLSEENKKHFQVEADGFLDEIEEEQNPFKDTLIR |
| | | HQDRFPYFALRYLDLNESFKSIRFQVDLGTYHYCIYDKKIGDEQEKRH |
| | | LTRTLLSFGRLQDFTEINRPQEWKALTKDLDYKETSNQPFISKTTPHY |
| | | HITDNKIGFRLGTSKELYPSLEIKDGANRIAKYPYNSGFVAHAFISVHE |
| | | LLPLMFYQHLTGKSEDLLKETVRHIQRIYKDFEEERINTIEDLEKANQG |
| | | RLPLGAFPKQMLGLLQNKQPDLSEKAKIKIEKLIAETKLLSHRLNTKLK |
| | | SSPKLGKRREKLIKTGVLADWLVKDFMRFQPVAYDAQNQPIKSSKA |
| | | NSTEFWFIRRALALYGGEKNRLEGYFKQTNLIGNTNPHPFLNKFNW |
| | | KACRNLVDFYQQYLEQREKFLEAIKNQPWEPYQYCLLLKIPKENRKN |
| | | LVKGWEQGGISLPRGLFTEAIRETLSEDLMLSKPIRKEIKKHGRVGFIS |
| | | RAITLYFKEKYQDKHQSFYNLSYKLEAKAPLLKREEHYEYWQQNKPQ |
| | | SPTESQRLELHTSDRWKDYLLYKRWQHLEKKLRLYRNQDVMLWLM |
| | | TLELTKNHFKELNLNYHQLKLENLAVNVQEADAKLNPLNQTLPMVL |
| | | PVKVYPATAFGEVQYHKTPIRTVYIREEHTKALKMGNFKALVKDRRL |
| | | NGLFSFIKEENDTQKHPISQLRLRRELEIYQSLRVDAFKETLSLEEKLLN |
| | | KHTSLSSLENEFRALLEEWKKEYAASSMVTDEHIAFIASVRNAFCHN |
| | | QYPFYKEALHAPIPLFTVAQPTTEEKDGLGIAEALLKVLREYCEIVKSQI |
| 268 | Cas13 | MEKPLPPNVYTLKHKFFWGAFLNIARHNAFITICHINEQLGLTTPPN |
| | | DDKIADVVCGTWNNILNNDHDLLKKSQLTELILKHFPFLAAMCYHP |
| | | PKKEGKKKGSQKEQQKEKEKEKENEAQSQAEALNPSELIKVLKTIVK |
| | | QLRTLRNYYSHHSHKKPDTEKDIFKHLYKAFDASLRMVKEDYKAHFT |
| | | VNLTRDFAHLNRKGKNKQDNPDFNRYRFEKDGFFTESGLLFFTNLFL |
| | | DKRDAYWMLKKVSGFKASHKQREKMTTEVFCRSHILLPKLRLESRY |
| | | DHNQMLLDMLSELSRCPKLLYEKLSEENKKHFQVEADGFLDEIEEEQ |
| | | NPFKDTLIRHQDRFPYFALRYLDLNESFKSIRFQVDLGTYHYCIYDKKI |
| | | GDEQEKRHLTRTLLSFGRLQDFTEINRPQEWKALTKDLDYKETSNQP |
| | | FISKTTPHYHITDNKIGFRLGTSKELYPSLEIKDGANRIAKYPYNSGFVA |
| | | HAFISVHELLPLMFYQHLTGKSEDLLKETVRHIQRIYKDFEEERINTIE |
| | | DLEKANQGRLPLGAFPKQMLGLLQNKQPDLSEKAKIKIEKLIAETKLL |
| | | SHRLNTKLKSSPKLGKRREKLIKTGVLADWLVKDFMRFQPVAYDAQ |
| | | NQPIKSSKANSTEFWFIRRALALYGGEKNRLEGYFKQTNLIGNTNPH |
| | | PFLNKFNWKACRNLVDFYQQYLEQREKFLEAIKNQPWEPYQYCLLL |
| | | KIPKENRKNLVKGWEQGGISLPRGLFTEAIRETLSEDLMLSKPIRKEIK |
| | | KHGRVGFISRAITLYFKEKYQDKHQSFYNLSYKLEAKAPLLKREEHYEY |
| | | WQQNKPQSPTESQRLELHTSDRWKDYLLYKRWQHLEKKLRLYRNQ |
| | | DIMLWLMTLELTKNHFKELNLNYHQLKLENLAVNVQEADAKLNPL |
| | | NQTLPMVLPVKVYPATAFGEVQYQETPIRTVYIREEHTKALKMGNF |
| | | KALVKDRRLNGLFSFIKEENDTQKHPISQLRLRRELEIYQSLRVDAFKE |
| | | TLDLEEKLLKKHTSLSSLENKFRILLEEWKKEYAASSMVTDEHIAFIAS |
| | | VRNAFCHNQYPFYEEALHAPIPLFTVAQQTTEEKDGLGIAEALLRVL |
| | | REYCEIVKSQI |
| 269 | Cas13 | MGAIENKHIFAAYANLAIDGLIKTLNFIAKKLDTQKQLSSWDIKHVITL |
| | | IDSIFDQNPQNNLEQVVEGYLPWIKPIIEMKTPKKGERQSDKLCIEYK |
| | | TIITAFASLLNDVRNYYTHYYHDPICIYPGGYDIPSSLNCIYDSAINIIKE |
| | | RFQAEEKEIEHLRRYTRKKGRVVLKTEDDHFYYTLVNNNDLSEKGYA |
| | | FFISMFLERKYSYLFLKKLSGFKRGDSLQYRLTLEVFTALSTKPPVERLR |
| | | TTKDTKQDRALDILNELSRIPIELYQTLEPKYREMYNETLQPTDAEDP |
| | | YGLPDRSRIRFRSRFEAFALHFLDKQADFKEIGFYTYLGNYFHNGYOK |
| | | TRVDRETKDRYINFQLAGFCKNIQDISAKKLSEALNVKSIDISTDSIPDI |
| | | NSFEPYLVQSTPHYIVNGNNIGIKVLPEGKDTYPTIDEKGAKMPIADF |
| | | WLSKYELPAMLFYTYLRNNNIHKSHCPLSVKDIIERSIHKSTKOKHPE |
| | | ERSELMLRRVMKAIFWTDSKLNEVERIKSQKSAFGKRQHEILKAGRI |
| | | AETLVRDMLWLQPSKNNGRDKVTEPNFQAIQVSLAYFGIRRNDLTE |
| | | IFTRAGLINSSNPHPFLAQIGTNYTSLIEFYIAYLKERKVYFSRIQKKILO |
| | | GKLNIQCHPLRDLQREPNKPQDKEEAIFLPRGLFNEAIINCLKKSKLK |
| | | QLIESPTREKSPALNVSYLIQNYFRTYFEDQSQEFYAQPRNYRLFDKL |
| | | SPNKGKSKSYLSLEQRIKKMEELRPSKIPVAEANKLLEKEDRLYRKNY |
| | | NEICDNESIIRLYQIQDILLFMMTKEYLPSDLYNRINKYKLENVKGILN |
| | | ERVSYLIDLNPLKIQGEDIKIKDYGKLFYIHHDTRISSLNKVLSKVKRNN |
| | | SISSSVKIQPYENYKRECLDFEEAQIQIIPIIHSFEIAMVSMFPDLKKAT |
| | | PGNYYDFNELITEYEKRTKQKIDSSFLIKTRNMFLHDKYEAECIKEISD |
| | | DFVYAKKIIAEFKMKIENIKLEDLSNDSSA |
| 270 | Cas13 | MEKPLLPNVYTLKHKFFWGAFLNIARHNAFITICHINEQLGLKTPSN |
| | | DDKIVDVVCETWNNILNNDHDLLKKSQLTELILKHFPFLTAMCYHPP |
| | | KKEGKKKGHQKEQQKEKESEAQSQAEALNPSKLIEALEILVNQLHSL |
| | | RNYYSHYKHKKPDAEKDIFKHLYKAFDASLRMVKEDYKAHFTVNLTR |
| | | DFAHLNRKGKNKQDNPDFNRYRFEKDGFFTESGLLFFTNLFLDKRD |
| | | AYWMLKKVSGFKASHKQREKMTTEVFCRSRILLPKLRLESRYDHNQ |
| | | MLLDMLSELSRCPKLLYEKLSEENKKHFQVEADGFLDEIEEEQNPFK |
| | | DTLIRHQDRFPYFALRYLDLNESFKSIRFQVDLGTYHYCIYDKKIGDEQ |
| | | EKRHLTRTLLSFGRLQDFTEINRPQEWKALTKDLDYKETSNQPFISKT |
| | | TPHYHITDNKIGFRLGTSKELYPSLEIKDGANRIAKYPYNSGFVAHAFI |
| | | SVHELLPLMFYQHLTGKSEDLLKETVRHIQRIYKDFEEERINTIEDLEK |
| | | ANQGRLPLGAFPKQMLGLLQNKQPDLSEKAKIKIEKLIAETKLLSHRL |
| | | NTKLKSSPKLGKRREKLIKTGVLADWLVKDFMRFQPVAYDAQNQPI |
| | | KSSKANSTEFWFIRRALALYGGEKNRLEGYFKQTNLIGNTNPHPFLN |
| | | KFNWKACRNLVDFYQQYLEQREKFLEAIKNQPWEPYQYCLLLKIPKE |
| | | NRKNLVKDWEQGGISLPRGLFTEAIRETLSEDLMLSKPIRKEIKKHGR |
| | | VGFISRAITLYFKEKYQDKHQSFYNLSYKLEAKAPLLKREEHYEYWQQ |
| | | NKPQSPTESQRLELHTSDRWKDYLLYKRWQHLEKKLRLYRNQDVM |
| | | LWLMTLELTKNHFKELNLNYHQLKLENLAVNVQEADAKLNPLNQTL |
| | | PMVLPVKVYPATAFGEVQYHKTPIRTVYIREEHTKALKMGNFKALVK |
| | | DRRLNGLFSFIKEENDTQKHPISQLRLRRELEIYQSLRVDAFKETLSLEE |
| | | KLLNKHTSLSSLENEFRALLEEWKKEYAASSMVTDEHIAFIASVRNAF |
| | | CHNQYPFYKEALHAPIPLFTVAQPTTEEKDGLGIAEALLKVLREYCEIV |
| | | KSOI |
| 271 | Cas13 | MEKPLPPNVYTLKHKFFWGAFLNIARHNAFITICHINEQLGLTTPPN |
| | | DDKIADVVCGTWNNILNNDHDLLKKSQLTELILKHFPFLAAMCYHP |
| | | PKKEGKKKGSQKEQQKEKENEAQSQAEALNPSELIKALKTLVKQLRT |
| | | LRNYYSHYKHKKPDAEKDIFKHLYKAFDASLRMVKEDYKAHFTVNLT |
| | | QDFAHLNRKGKNKQDNPKFDRYRFEKDGFFTESGLLFFTNLFLDKR |
| | | DAYWMLKKVSGFKASHKQSEKMTTEVFCRSRILLPKLRLESRYDHN |
| | | QMLLDMLSELSRCPKLLYEKLSEKDKKHFQVEADGFLDEIEEEQNPF |
| | | KDALIRHQDRFPYFALRYLDLNESFKSIRFQVDLGTYHYCIYDKKIGDE |
| | | QEKRHLTRTLLSFGRLQDFTEINRPQEWKALTKDLDYKETSKQPFISK |
| | | TTPHYHITDNKIGFRLGTSKELYPSLEVKDGANRIAKYPYNSDFVAHA |
| | | FISVHELLPLMFYQHLTGKSEDLLKETVRHIQRIYKDFEEERINTIEDLE |
| | | KANQGRLPLGAFPKQMLGLLQNKQPDLSEKAKIKIEKLIAETKLLSHR |
| | | LNTKLKSSPKLGKRREKLIKTGVLADWLVKDFMRFQPVAYDVQNQP |
| | | IESSKANSTEFQLIQRALALYGGEKNRLEGYFKQTNLIGNTNPHPFLN |
| | | KFNWKACRNLVDFYQQYLEQREKFLEAIKNQPWEPYQYCLLLKIPKE |
| | | NRKNLVKGWEQGGISLPRGLFTEAIRETLSEDLTLSKPIRKEIKKHGRV |
| | | GFISRAITLYFRERYQDDHQSFYNLPYELEAKASTPKPPLPKKREYVLR |
| | | AEHYEYWQQNKPQSPTELQRLELHTSDRWKDYLLYKRWQHLEKKL |
| | | RLYRNQDVMLWLMTLELTKNHFKELKLNYHQLKLENLAVNVQEAD |
| | | AKLNPLNQTLPMVLPVKVYPATAFGEVQYQETPIRTVYIREEQTKAL |
| | | KMGNFKALVKDRRLNGLFSFIKEENDTQKHPISQLRLRRELEIYQSLR |
| | | VDAFKETLSLEEKLLNKHASLSSLENEFRTLLEEWKKKYAASSMVTDE |
| | | HIAFIASVRNAFCHNQYPFYKETLHAPILLFTVAQPTTEEKDGLGIAEA |
| | | LLRVLREYCEIVKSQI |
| 272 | Cas13 | MEKPLLPNVYTLKHKFFWGAFLNIARHNAFITICHINEQLGLKTPSN |
| | | DDKIVDVVCETWNNILNNDHDLLKKSQLTELILKHFPFLTAMCYHPP |
| | | KKEGKKKGHQKEQQKEKESEAQSQAEALNPSKLIEALEILVNQLHSL |
| | | RNYYSHYKHKKPDAEKDIFKHLYKAFDASLRMVKEDYKAHFTVNLTR |
| | | DFAHLNRKGKNKQDNPDFNRYRFEKDGFFTESGLLFFTNLFLDKRD |
| | | AYWMLKKVSGFKASHKQREKMTTEVFCRSRILLPKLRLESRYDHNQ |
| | | MLLDMLSELSRCPKLLYEKLSEENKKHFQVEADGFLDEIEEEQNPFK |
| | | DTLIRHQDRFPYFALRYLDLNESFKSIRFQVDLGTYHYCIYDKKIGDEQ |
| | | EKRHLTRTLLSFGRLQDFTEINRPQEWKALTKDLDYKETSNQPFISKT |
| | | TPHYHITDNKIGFRLGTSKELYPSLEIKDGANRIAKYPYNSGFVAHAFI |
| | | SVHELLPLMFYQHLTGKSEDLLKETVRHIQRIYKDFEEERINTIEDLEK |
| | | ANQGRLPLGAFPKQMLGLLQNKQPDLSEKAKIKIEKLIAETKLLSHRL |
| | | NTKLKSSPKLGKRREKLIKTGVLADWLVKDFMRFQPVAYDAQNQPI |
| | | KSSKANSTEFWFIRRALALYGGEKNRLEGYFKQTNLIGNTNPHPFLN |
| | | KFNWKACRNLVDFYQQYLEQREKFLEAIKNQPWEPYQYCLLLKIPKE |
| | | NRKNLVKGWEQGGISLPRGLFTEAIRETLSEDLMLSKPIRKEIKKHGR |
| | | VGFISRAITLYFKEKYQDKHQSFYNLSYKLEAKAPLLKREEHYEYWQO |
| | | NKPQSPTESQRLELHTSDRWKDYLLYKRWQHLEKKLRLYRNQDVM |
| | | LWLMTLELTKNHFKELNLNYHQLKLENLAVNVQEADAKLNPLNQTL |
| | | PMVLPVKVYPATAFGEVQYHKTPIRTVYIREEHTKALKMGNFKALVK |
| | | DRRLNGLFSFIKEENDTQKHPISQLRLRRELEIYQSLRVDAFKETLSLEE |
| | | KLLNKHTSLSSLENEFRALLEEWKKEYAASSMVTDEHIAFIASVRNAF |
| | | CHNQYPFYKEALHAPIPLFTVAQPTTEEKDGLGIAEALLKVLREYCEIV |
| | | KSQI |
| 273 | Cas13 | MEKPLLPNVYTLKHKFFWGAFLNIARHNAFITICHINEQLGLKTPSN |
| | | DDKIVDVVCETWNNILNNDHDLLKKSQLTELILKHFPFLTAMCYHPP |
| | | KKEGKKKGHQKEQQKEKESEAQSQAEALNPSKLIEALEILVNQLHSL |
| | | RNYYSHYKHKKPDAEKDIFKHLYKAFDASLRMVKEDYKAHFTVNLTR |
| | | DFAHLNRKGKNKQDNPDFNRYRFEKDGFFTESGLLFFTNLFLDKRD |
| | | AYWMLKKVSGFKASHKQREKMTTEVFCRSRILLPKLRLESRYDHNQ |
| | | MLLDMLSELSRCPKLLYEKLSEENKKHFQVEADGFLDEIEEEQNPFK |
| | | DTLIRHQDRFPYFALRYLDLNESFKSIRFQVDLGTYHYCIYDKKIGDEQ |
| | | EKRHLTRTLLSFGRLQDFTEINRPQEWKALTKDLDYKETSNQPFISKT |
| | | TPHYHITDNKIGFRLGTSKELYPSLEIKDGANRIAKYPYNSGFVAHAFI |
| | | SVHELLPLMFYQHLTGKSEDLLKETVRHIQRIYKDFEEERINTIEDLEK |
| | | ANQGRLPLGAFPKQMLGLLQNKQPDLSEKAKIKIEKLIAETKLLSHRL |
| | | NTKLKSSPKLGKRREKLIKTGVLADWLVKDFMRFQPVAYDAQNQPI |
| | | KSSKANSTEFWFIRRALALYGGEKNRLEGYFKQ.TNLIGNTNPHPFLN |
| | | KFNWKACRNLVDFYQQYLEQREKFLEAIKNQPWEPYQYCLLLKIPKE |
| | | NRKNLVKGWEQGGISLPRGLFTEAIRETLSEDLMLSKPIRKEIKKHGR |
| | | VGFISRAITLYFKEKYQDKHQSFYNLSYKLEAKAPLLKREEHYEYWQQ |
| | | NKPQSPTESQRLELHTSDRWKDYLLYKRWQHLEKKLRLYRNQDVM |
| | | LWLMTLELTKNHFKELNLNYHQLKLENLAVNVQEADAKLNPLNQTL |
| | | PMVLPVKVYPATAFGEVQYHKTPIRTVYIREEHTKALKMGNFKALVK |
| | | DRRLNGLFSFIKEENDTQKHPISQLRLRRELEIYQSLRVDAFKETLSLEE |
| | | KLLNKHTSLSSLENEFRALLEEWKKEYAASSMVTDEHIAFIASVRNAF |
| | | CHNQYPFYKEALHAPIPLFTVAQPTTEEKDGLGIAEALLKVLREYCEIV |
| | | KSOI |
| 274 | Cas12a | MKSLAQFQNLYALQKTLRFELKPEGHTRETFNRWLEEIEKEQASENE |
| | | NIVYQDLLRAKKYEKIKIILDEYHKDFIEQALAYANLTELEKYEELYRKS |
| | | NRTSEEEEEFENTKESLRKQIANIFIKNPNKTVQERWKFLFSKKLIQNE |
| | | LIVWVKGNYELLSEKLKNEFPDESSIISTIEDFKYFTTYFRNYHENRKNL |
| | | YSNEDKFSTIAHRLIHENLPKFIDNIAIYQKAKAVLNINEVEKELGLPED |
| | | TLDKIFSLDFFSKALTQKGIDQYNYFLGGKTENEVKKIKGLNEFINLYN |
| | | QQQQDKNQRLPFLKVLYKLPLFERTSTSFRFEPIENDRDLIERIGKFYY |
| | | NDLKQYRDDSQGDTTDILSGINTLLRHVHDYRDGLYVNGGITLTOIS |
| | | QKIFGSWSYINNALAYFYDTYIDASGVDHQGERKPKKQKOIQEKTK |
| | | WLKQKQFPVILVEKALSEYKSIETNEDLKTRISDTTLCDFFKRCGNDD |
| | | NGQDLFDRIEARLREKNEEGYSLEDLLKKEFTTERKLMQDKTKTLLIK |
| | | NFLDVIQGDKDDITAGLLHFVKCLIPRTEISEKNELFYSGMEKYLNILS |
| | | EVTPLYNKARNYLTQKPYSIEKVKLNFENSTLLDGWDENEESDNSCV |
| | | LLRKRGYYYLGIMNKKHNMIFDRKIYPKATEGEAYYEKMIYKLLPGAY |
| | | KMLPKVFFSEKNIDYFKPSEEILRIRNTASYSKNGQPQEGYQKASFSIE |
| | | DCRKYIDFFKKCIANHWDWQKFNFNFSPTEYYQSIDEFYREIERQGY |
| | | KIDFVKIPESYINQLIKENKLYLFKIYNKDFSEKKKSKGKDNLHTLYWK |
| | | MLFDEKNLKDVVLKLNGEAEVFFRQKSILYNEEIWNKGHHYSELKDR |
| | | FSYPIISNKRYAEDKFFLHVPITLNFKADGINNVNNMVNEFIKDNRDI |
| | | HIIGIDRGERHLLYVSVINQKGDIVEQCSLNEIVTEYNGKIFKKNYHEE |
| | | LDNLEKERDRARKDWQTIANIKELKEGYLSHVIHKISKLILKYNAIVV |
| | | MEDLNSGFKRGRQKVEKQVYQNFEKQLIEKLNYLVLKESNVDEPGG |
| | | VLRAYQLANKFETFKKLGKQSGIIFYVPAAYTSAIDPVTGYIQYLYPLK |
| | | QADSVEKARKFYSQFKRISYNPHKQWFEFSFDYNDFNIIYHGKSSWT |
| | | ICTTNTERYMWNRLLNNGHGGEELVYVTNELELLFGEYNIIYGDGKD |
| | | IKQQITDVQDIDVDRTAKQFYKRINELLNLTLKLRHNNGKKGADEED |
| | | YILSPVEPYFDSRFESRKPSMQQTLPINADANGAFNIARKGLLLLERL |
| | | NQLGVEEFEKTKKSNNKKTQWLPHELWVEYAQNHTRK |
| 275 | Cas12a | MQDKTGWSSFTNKYSLSKTLRFELKPVGNTQKMLEDDGVFQKDRE |
| | | RQENYKKVKPFMDKLHREFIKEALNNLKLEGLTEYFEIFKKFRKDKNN |
| | | KELKNAEKKLRQIIGRCYTETAQIWVEKYKEFGFKKKNIGFLFEEGVFE |
| | | LMKLKYGNDEASQIEKNGEVLSIFDGWKGFLGYFKKFFETRNNFYKD |
| | | DGTSTAVSTRIINENLKIYLDNLIKYNKIKDKVDFKEADILQENKLNLS |
| | | DFFNVESYAKYSLQKGIDYYNEILGGKTLKNGTKLKGLNEVINEYKQK |
| | | NKSGELSKFKMLKKQILGEGEDRTLFEEIENEDELKDVLKDFFYNADP |
| | | KITLFKTLLEDFFSNTEKYKDELDKIYFNTVAINGILHRWVDDSGVFQ |
| | | KYLFEVLKSNKLVKSNHYDKKEDSYKFPDFISFEHIKVALENCERDGLK |
| | | DKFWKEKYYTKECLTENGLANLWQEFLEIYKCEFKKLYDYKTDDNDC |
| | | YLQYRDNYKKYILDANFNPKEKSAKDIIKDYLDSVLSIYQLAKYFALEK |
| | | KKVWTTDYETGDFYYEYIKFYEDTYEQJIKPYNLVRNYLTRKPINTAKK |
| | | WKLNFDNAYLASGWDKDKEVSNLTVILRRDEQYYLAIMKKGKNKIF |
| | | EKKFSCGEFEKMEYKQIAEASSDIHNLVLMNDGSCRRCIKMHDKRK |
| | | YWPLDISIIKEKKSYAKENFVRRDFERFVNYMKKCSLLYWKEYDLKFS |
| | | DTSTYKNINDFTNEIASQGYKLSFSAIPESYINEKNNNGELYLFQIYNK |
| | | DFGIKTEGNKNLHTMYWESIFSEENRFRNFIVKLNGKAEIFYRPKSEQ |
| | | VEKEQRNFTREIIKNRRYTENKIYFHCPITLNRISRENVKKFNNGINNY |
| | | lATNPNINILGVDRGEKHLVYYAlVDQDGKLIDAEDATGSFNTIGSTD |
| | | YHRLLEEKAKDREKERKDWDLIRGIKDLKKGYISLVVRKIADLAIKYNA |
| | | IIIFEDLNTRFKQIRGGMEKSVYQQLEKALINKLSFLVNKGEKDPEQA |
| | | GHLLKAYQLAAPFQTFDKMGRQTGIIFYTQASYTSKIDPITGWRPNL |
| | | YLKYRNIDDSKESIKKFKSILFNKEKNRFEFTYDLKDFVDFEEDKIPEKT |
| | | EWTLCSSVERHKWNRHMNNNKGGYEVYKDLTENFYKLFDENNIS |
| | | MNKDIVDQVESISNGNFFRQFIYLFNLVCQIRNTDEKAEDVDKRDFI |
| | | LSPVEPFFDSRRAKDFKAYGDNLPKNGDENGAYNIARKGVLIIKKIKE |
| | | YYNQNGSCDKLGWGDLSISHKEWDDFATNN |
| 276 | Cas12a | MDSYEQFTKLYPIQKTIRFELKPQGRTKEHFDNSNFLEKDRERDDNY |
| | | KILKEVIDDYHREFIDECLSNIQLNWDDLKKFSEEYRRSKEKKNNRDS |
| | | ESEQKRMSTTSETRAINKKNLEAEQKRMRGEIVSAFKKDDRFKHLFS |
| | | EKLFSILLKNQIYEKGTLEEIEAFDCFNKFSGYFKSFHENRKNMYSDED |
| | | KETAISYRIINENFPKLLDNFEKYQYVCREYPEQIREAESTLAEAGCYIK |
| | | MDEIFSIDNFNNVMMQGGKESGISRYNLAIGGIVQGTGEKPKGLNE |
| | | FLNLAYQNEPNGRKKIRMEPLYKQILSKEESFSYRLEAFTDDSQLLSAI |
| | | RSFFDIVEKDKNGNIFDRAVNLMSSFSNYDTSKIYIRKAYLNQVSKEIF |
| | | GYRGKSDSKPAKTADESLNKSGGWEKLGQMLRDYKADSIGDRNLE |
| | | KTCKKVDKWLDSDEFTLSDILGAISLAGSNETFEAYVSEICVARRNIDK |
| | | EKEKEKNINVEKISGDTESIQIIKALLDSVQEFFHLLSPFQLHPNTPHD |
| | | WTFYAEFNDIYDKLSAITPLYNQARNHLTKKNLDTSKIKLNFNNPTLA |
| | | NGWDVNKEYENTAVILIRDGKYYLGIMNPKNKRKIKFDEGSGAGPF |
| | | YQKMVYKLLPGPYRMLPKVFFAKKNIDYYNPSQEIREGYKAGKHKK |
| | | GKEFDKGFCHKLIDFFKESIQKNENWKVFDFKFSPTESYDDISEFYQE |
| | | VEKQGYRMYFVNIPSDTIDRYVEGGDMFLFQIYNKDFAKGAKGNK |
| | | DMHTLYWNAVFSEENLQKGVMKLSGEAELFYRKKSDIKDPPHREG |
| | | EILVNRTYIDRTHVSGVMGEQNTVKESRIPVPDEIHKNLFDYYNHGR |
| | | ELTKEEKEYCDKVGSFKAYYGIVKDRRYLENKMYFHVPLTLNFKAIGE |
| | | KRINKMAIEKFLTDENACIIGIDRGERNLLYYSIIDRNGKIIDQKSLNVI |
| | | DGFDYHEKLSQRQTEREVARQSWNSIGKIKDLKEGYLAKAVHEISK |
| | | MAIKYNAIVVLEDLHFGFKKGRLKVEKQIYQKFEEMLINKLNYLVFKD |
| | | VSDSSDAGGVLNAYQLTAPLESFSKLGKQSGILFYVPAAFTSVIDPTT |
| | | GFVDLFNSSSITSTQKKKEFLQRFESIVYSARDGGIFAFTFDYRNFSKIA |
| | | TDHRNMWTVYTHGERIRYVRDEKCYKTTDPTKRIKEALSGIEYDDGS |
| | | DIRDKITQSGDNNLINTVYHSFMDTIKMRNKDGRIDYIISPVKNRNG |
| | | EFFRSDYKHRDFPVDADANGAYHIALKGELLMRMIGKTYDSNSDK |
| | | MPKLEHKDWFEFMQTRGDO |
| 277 | Cas12b | MCVSRLPWFNITLTGKLNRQRLNQMCVSRLPWFCTPKGQLAATPK |
| | | TVVAQQENAMLAIIRDVHEAAPADLKTVAQRLEPGYFVTQFPKQQ |
| | | MTGDEARAEAERLFAACQKKFKELAEYEDGYRQCLDALGPNLSLPR |
| | | LGRKPKGAYPYAVVFKLMPTNATWECFKRVTASLYKRAQKGVVSP |
| | | VSADSIADVRTNDEPLFEYFTNLALVRPPGNKDRAVWFEFDLAAFIE |
| | | AIKSPHQFFQDTIKREQAVAQIKAKLDAMDGQGRAASGEEDALPGF |
| | | EGDDRITLLRELVTDTLGYLAEADASTSPGGKIEYSIQERTVRGFAEVK |
| | | RRWRDLVEKGKATEDALLKVLAEEQTEHRDDFGSATLYRELAKPKF |
| | | QPIWRDPGTQPWHADDPLRAWLEYRELGRELEDKQRPIRFTPVHP |
| | | VHSPRFFIFPKKKGGGRFGTVHEPGQLRVMAGIVAQTQHGWEPVP |
| | | VRITYAAPRLRRDQLRDDVETDLESRPWLQPMMQALGLPEPDTAD |
| | | FSNCRVTLQPSAPDDIQLTFPVDVSADKLTTAIGKAARWAKQFNLFP |
| | | DGDNFYNASLRWPHEKKPSKPPVPWHEALDNFSVLAADLGQRCA |
| | | GAFARLEVRANDDFAGKPSRFIGETPGKKWRAALVAAGMLRLPGE |
| | | EQTVWRPGATGPNFHTELSGSRGRMARPHEADDTADLLRAFDCPE |
| | | ESLMPADWRTSLSFPEQNDKLLVAARRYQSRLARLHRWCWFLTDE |
| | | KKRQTALDEIREAEDMPAADDPQLTDKLRALLLQKQAALPGLLVRL |
| | | ANRILPLRGRSWQWETHPDKADCHLLTQTGPALPDVWIRGQRGLS |
| | | MQRIEQIEELRRRFQSLNQMQRREIGGKPPIRRDDSIPDCCPDLLDK |
| | | LDQIKEQRANQAAHMILAEALGLRLAPPPADKRQLRASRDVHGOY |
| | | VKSREPVDFIVIEDLSRYRSSQGRAPRENSRLMKWCHRAVRDKLREL |
| | | CEPFGIPVVETPAAYSSRFCSRSGVAGFRAVEVGPGFDREFPWMML |
| | | KDREDEGEPVRQLILQVATLNQGRDGKPPRTLLAPLAGGPIFVPIVD |
| | | KLNGADIQPALAQADINAAINLGLRAIADPRLWSIHPRCRTQRQGD |
| | | QMLTREKRKFGETGQPLAVHRADGVKPDDTRNPNFFADISGSLPA |
| | | WESATLDGQHLLSGRCLRSEIKKRQWQRCAEINDRRMNRWMKGE |
| 278 | Cas12b | MTELQTQRAYTLRLKGIDEKDQSWRDALWKTHEAVNKGAKVFGD |
| | | WLLTLRGGLDHTLADAEIPGEKGKPDRAPTQEERKHRRILLALSWLS |
| | | VESERGAPEEFIVATGKEPAATRNDKVIAALKDILRGRNLTEEKISEW |
| | | TEVCTPSLSAAIREDAVWVNRSRAFDEAVKRIGSSLTREEVWDMLE |
| | | CFFGSRNAYLAPVKISEDESSDGEQEEKAKDLVQKAGQWLSSRFGT |
| | | GEGADFAKMAAVYAKIAAWAGNAQAGTTGNEVINNLATALREFT |
| | | PKSNDLKGVLDLISGPGYKSATRNLLKQIANTKTVTREDISKLQETAG |
| | | EDSEECATKTGSKGKRAYADAILKDVESVCGFTYRIDKDGQPVSVAD |
| | | YSKYDEDYKWGSSRHKEFAVMLDHAARRVSLAHTWIKRAEAERRK |
| | | FEEDSKKIMQVPQAAKDWLDAYCAQRSEASGALEPYRIRKRAIQG |
| | | WKEIIASWNKPDCKTAEDRIAAARQLQDDPEIEKFGDIQLFEALAED |
| | | DAQCVWKKEDGTLDPEILINYTLASEAMFKKQHFKVPSYRHPDAFL |
| | | YPVFCDFGNSRWELDFSIREAATKLKEIEAKIEKQRQEVHKVQQALE |
| | | KCENDEKRPKMEERLKEAQKKLQESQNYGEYLHSNNKITMVLFDGT |
| | | FVKKHIFAWQSKRLTKDLALYQEPSADPKNVVSRADRLGRAVASVG |
| | | INDAVKVAGLFEQENWNGRLQAPRQQLEAIAQYVEKHGWDNKAE |
| | | KMRASIKWFITFSAKLQSKGPWNEFARKHGLKEDPHYWPHAEKNE |
| | | NRTAHSRLILSRLPGLRVLSVDLGHRYAAACAVWEALGSEAFKKDIE |
| | | GKRIIRGDTDENALYCHTEHEANGKKHITIYRRIGADTLPDGAHHPA |
| | | PWARLDRQFLIKLQGEDEQAREASNEEIWKVHQLENTLGRRTPLID |
| | | RLIAGGWGYTEKQKARLEVLTNLGWCPTNKTDNQEEGDEEETAILS |
| | | KPSLLVDDLMFSAVRTLRLALKRHGDRARIAHYLITDEKTKPGGVKEK |
| | | LDKNGRVELLLDALGLWHDLFSSPGWHDEKAKQLWNAYIAGLLPE |
| | | GELQQAKSVTTSAALGGQQKKEKKEKLRAVAEALYLNSDLCHSLNE |
| | | VWRKRWEEDDKQWRIYIRWFKDWIMPRGANAKSPAIRHVGGLSL |
| | | TRLATLTEFRRKVQVGFFTRLHPDGTKTETREDFGQKTLDTLEHLRE |
| | | QRVKQLASRIVEAALGIGSEDKRHWDGKKRPRQRIADPRFVPCHAV |
| | | VIENLTHYRPEETRTRRENRQIMEWASSKVKKYLSEICQLHGLHLRE |
| | | VSAAYTSHQDSRTGAPGIRCQDVSLIEFMKSPFWRKQVAQAEKKQ |
| | | KEGKGDAVERYLCELNQKWKGASEEEWRKAGFVRIPLRGGEIFVSA |
| | | AGHDSPAAKGIHADLNAAANIGLRALLDPDWSGKWWYVPCNSST |
| | | MCPARDKVTGSAAVNPGQPLQVSAQLESDDAAKDTKKRKKKGDG |
| | | KSKEIINLWRDISSYPLEDTRGGTWSNKTVYWNRVQSNVVHILQNQ |
| | | MKG |
| 279 | Cas12b | MPETTQRAYTLRLQGHDPKDASWREALWKTHEAVNRGAKAFGD |
| | | WLLTLRGGLDHSLADEGAPGQTPTEEQRKQRRILLALSWLSVESEN |
| | | GAPQEYIVPHDRDNESGARQNWKTREALREILKNRGCRDDEIESW |
| | | CHDCEPSLTSAIRKDAVWVNRSKAFDNAVQSIPNFSREEIWDLLGCF |
| | | FVSSQAYLAPLESPKDDKPDASKKDSSKDLIQSAGQWLSRRFGRGK |
| | | GLNFARLAETYEAIARWASVANPGDTNDLIADLAKTLNAETPELDGI |
| | | LKVVSGPGHKSKTRNLLRSLSAVNHITKDTLQRLKDTANEDAKKAKL |
| | | KKGEKGHRAYAYKVLEAVEDACGFTYLQEGDRAKHCEFAVMLDHA |
| | | ARRVSSLHTWIKRAEAERRRFEIDTKKKDQLPPSVKEWLDTYCQKRS |
| | | KETGAVEPYRIRRGAIEGWKEIVEAWSKAGTTTAEDRKHEARRLPD |
| | | NPHIDKSGDIKLFEDLALEDALPVWHANGDPNNPPDPQLLIDYVEG |
| | | SEAEFKKRAFKVPTYCHPDPLVHPVFCDYGCSRWNVSFAIQPVKKQ |
| | | KLSSEEKLPAKGLLLDLLHGTAIRPVALRWQSKRFARDLALNTTDSSD |
| | | KPNEVTRADRFGCALAKCPSSQKIRIRGLFEEKYWNGRLQAPRPELT |
| | | ALAKRVAKYGWDKKARKLRNSLNWFITFSANLRPSGPWEEYTKYAE |
| | | KAFSSNASAKPSVSRGGFWVVHASPNKRGKMAQLRLCRLPELRVLS |
| | | VDLGHRYAAACAVWETLSKSAFEQEIHERKILRGGTGPNDLFCHTQ. |
| | | HDTNGQSKVTIYRRIGADTLPNGTPHPAPWARLDRQFLIKLPGEERE |
| | | ARKASPTELANVEKLEKELGLKTSENRVKRIDDLMSDTLRTVRQALR |
| | | RHSLRARIAFNLATLRDQSDGDEESQSKQKRDTRWNNTVKIWHSLL |
| | | ESNEWTDDWAKALWDELGPLSDPQKADDAEWLKLAAEKFYTRW |
| | | QEDEQTWRERLRWLRRWILPRGSQAASQKGSIRHVGGLSLTRLATI |
| | | KTLYQVLKAYHMRLKPDNSRKNIPAEGDEALQNFGQKILDDLEHMR |
| | | EQRVKQLASRIVEAALGLGRMKQVTIGKDPKRPREPVDQSCHAVVI |
| | | ENLTHYRPEKRQTRRENRQLMDWSAAKVKKYLKECCQLHGLHLVE |
| | | VSASYTSRQDSRTGAPGIRCQEVPLTDFLKKNFWREQVKQAKQRLS |
| | | EGKANARDRYLCQLNERWGNAPAPVTQTAIRLRIPLNGGELFVSAD |
| | | QNSPASKGIQADLNAAANIGLRAITDPDWPGAWWYVPCEANTFK |
| | | PVKDKVAGSAAIDSNVSLKKDSPNSEKPASDRKSRTSKSMINLWCD |
| | | TSSKSLSEKDQWQESAPYWEDVAARTINILQASLACSTTNSQ |
| 280 | Cas12a | MKSLAQFQNLYALQKTLRFELKPEGHTRETFNRWLEEIEKEQASENE |
| | | NIVYQDLLRAKKYEKIKIILDEYHKDFIEQALAYANLTELEKYEELYRKS |
| | | NRTSEEEEEFENTKESLRKQIANIFIKNPNKTVQERWKFLFSKKLIQNE |
| | | LIVWVKGNYELLSEKLKNEFPDESSIISTIEDFKYFTTYFRNYHENRKNL |
| | | YSNEDKFSTIAHRLIHENLPKFIDNIAIYQKAKAVLNINEVEKELGLPED |
| | | TLDKIFSLDFFSKALTQKGIDQYNYFLGGKTENEVKKIKGLNEFINLYN |
| | | QQQQDKNQRLPFLKVLYKLPLFERTSTSFRFEPIENDRDLIERIGKFYY |
| | | NDLKQYRDDSQGDTTDILSGINTLLRHVHDYRDGLYVNGGITLTQIS |
| | | QKIFGSWSYINNALAYFYDTYIDASGVDHQGERKPKKQKQIQEKTK |
| | | WLKQKQFPVILVEKALSEYKSIETNEDLKTRISDTTLCDFFKRCGNDD |
| | | NGQDLFDRIEARLREKNEEGYSLEDLLKKEFTTERKLMQDKTKTLLIK |
| | | NFLDVIQGDKDDITAGLLHFVKCLIPRTEISEKNELFYSGMEKYLNILS |
| | | EVTPLYNKARNYLTQKPYSIEKVKLNFENSTLLDGWDENEESDNSCV |
| | | LLRKRGYYYLGIMNKKHNMIFDRKIYPKATEGEAYYEKMIYKLLPGAY |
| | | KMLPKVFFSEKNIDYFKPSEEILRIRNTASYSKNGQPQEGYQKASFSIE |
| | | DCRKYIDFFKKCIANHWDWQKFNFNFSPTEYYQSIDEFYREIERQGY |
| | | KIDFVKIPESYINQLIKENKLYLFKIYNKDFSEKKKSKGKDNLHTLYWK |
| | | MLFDEKNLKDVVLKLNGEAEVFFRQKSILYNEEIWNKGHHYSELKDR |
| | | FSYPIISNKRYAEDKFFLHVPITLNFKADGINNVNNMVNEFIKDNRDI |
| | | HIIGIDRGERHLLYVSVINQKGDIVEQCSLNEIVTEYNGKIFKKNYHEE |
| | | LDNLEKERDRARKDWQTIANIKELKEGYLSHVIHKISKLILKYNAIVV |
| | | MEDLNSGFKRGRQKVEKQVYQNFEKQLIEKLNYLVLKESNVDEPGG |
| | | VLRAYQLANKFETFKKLGKQSGIIFYVPAAYTSAIDPVTGYIQYLYPLK |
| | | QADSVEKARKFYSQFKRISYNPHKQWFEFSFDYNDFNIIYHGKSSWT |
| | | ICTTNTERYMWNRLLNNGHGGEELVYVTNELELLFGEYNIIYGDGKD |
| | | IKQQITDVQDIDVDRTAKQFYKRINELLNLTLKLRHNNGKKGADEED |
| | | YILSPVEPYFDSRFESRKPSMQQTLPINADANGAFNIARKGLLLLERL |
| | | NQLGVEEFEKTKKSNNKKTQWLPHELWVEYAQNHTRK |
| 281 | Cas12b | MAYQNGKEQPTVTNQRAYTLRLSGTNDQDSIWRNRLWHTHEAV |
| | | NKGAKTFGDWLLTMRGGLCHTLAEADVPGKGNKPARHPTPQEIRS |
| | | RRVVLALSWLSVESQHGAPERHLVSHDLDIATGERKNWKTVEALRE |
| | | ILHGRCLCKELIDEWANDCRDSLSATIREDAVWVNRSKAFDLAAKKI |
| | | GASLTREELWDFLQPFFANKHGYLQMDTVAGVTNGDSETDAEEAK |
| | | EDSSEEKAKDLSQKAGQWLSSRFGTGTGADFSRFSKVYEVLAARCG |
| | | SVAVGVSGVEAIRILAGTLADFSPGSNDIEGMLGLMSGPGYKSATR |
| | | NILQKINTLQTVSQQDLDRLREASEKDALQSKQKVGGKGSRPYANAI |
| | | LQDVEAACGICYAGTGESPARHWQYAVILDHAARRVSMAHSWIKR |
| | | AEEQRSKFEIEKDKLDHVPKDALAWLDAFCARRSSESGASDAYRIRR |
| | | SAVDGWKQVVAAWAALPPKPENQGSELLSDAESARIQAARELQDT |
| | | VEKFGDIQLFEALSLTGAKCVWQPDGRPDAQPLLDYVAGTDAISKK |
| | | QRFKVPAYRHPDALLHPVFCDFGNSRWNINYAIHRAPEKLTPAQQL |
| | | LEKKKAEIDKAELTLAKAGDAAKQANISEKINGLRAAFIQQQEKVAW |
| | | LNSRHAMTMSLWDGTHIEDTPLIWQSKRFGSDIGQPVEAQPLPVS |
| | | RADRFGRAVALAQDNVPVIPSGLFDLSDWNGRLQAPRRQLEAIAAl |
| | | RDSAKLSVNEKQQLVAKRIQSIRWLLTFSAKLQSHGPFIAYAAQHGF |
| | | DWRYGAHGPENKSRQGLAKLILCRLPGLRILSVDLGHRYAAACAVW |
| | | ETLNAGQIQKACLDAGKEAPGPCTLYLHLKQIANGKEKKTIFRRIAAD |
| | | TLPDGSPHPAPWARLDRQFLIKLQGEDRDARLATSEEIAAVEQMEN |
| | | ELGVVRQLKRKGRELLVDELMSDALRTLRLGLRRHGVRARIAFNLTA |
| | | NKRIRPGGKEEVLDQEGRVLLLTETLLAWYELYTAERWTDEPAREL |
| | | WNRHIQPLLGATILQNTVNQEDTPSAAKRRKLREETSGKLKHVAEEl |
| | | AKNDSLCRQLHVLWSAQWQTEDVIWRTRLRMMRRWLLPRGVKR |
| | | NAQLRISIRDVGGLSLTRIASFKSLYQVQKAYQMRPHPEDPRLNIPER |
| | | GDSRLENFGQRVLDAMERMRENRVKQLASRIAEAALGIGGETGISS |
| | | KDGSQKKRPTERSSDPRFAPCHAVVIEDLTHYRPDETQTRRENRQL |
| | | MSWSSSKVKKYLGEACELNGLYLREVSPAYTSRQDSRTGAPGLRCN |
| | | DVTVVEFNNSPFWRKQVGAAEKNQKEGNKGDARERYLLSIEEGIRG |
| | | AANDRDIFRIPVKGGEIFVSACITDGGNNAKKNAPPGLQADLNAAA |
| | | NIGLRAIFDPDWEGRWWYIPCDAATLCPDAKKFIGCKAVDPTKPLR |
| | | VVAEEGAISASGIGSKKSGRKKNAATDGTRIVNLWRDPSGAPIHRD |
| | | VLRSPEWQDYAGYWNEVQHRVIRNLKTCYEQTSQQEDPFVSQDA |
| | | DKPF |
| 282 | Cas12b | MKRLAETALADKVKCETNSRPKGERAYANSILHDVESACGFTYRVD |
| | | KGEQPVPVSDYSHYANDYRWGPANHSEFAVMLDHAARRVSLAHT |
| | | WIKRAEAERRQFEENAKKIDKVPKVAREWLDSLCAERSIVLGALEPY |
| | | RIRRRAVDGWKHVVAAWSKSDCKTAQDRITAARLLQEDPEIDKFG |
| | | DIQLFEALAEDHAVCVWQRDGEAGKTSDPQLLIDYALAAEAEFKKR |
| | | HFKVPAYRHPEAFWHPVFCDFGQSRWKICFDVHKNRQSRRQRAC |
| | | ANRISRKICFDVHKKRQTLRLSLEVWTGSKMLDMPLCWQCKRLAR |
| | | DLALGQDHKKDRSCQVTRADRLGRAVSNVARNQEVQILGLFEQEY |
| | | WNGRLQAPRPQLEALGRYIEKHGWDAKAQKSCRAIRWMISFSPRL |
| | | QPAGPWGKFAEKLQLNPNPKYWPHAEDNKDRGSRSKLILCRLPGL |
| | | RVLSVDLGHRYAAACAVWEAVDAEQVKEACQAAGHREPNENDLY |
| | | LHLKKRTTKQKKGSQGVVEETTIYRRIGADTLPDCTPHPAPWARLDR |
| | | QFLIRLQGEEDEARAASNEEVWAVHKLEAELGRTIPLIDRLLGAGW |
| | | GQTEKQKARLKALRELGWTPANKCQAFNSTDETELRRPSLAVDEL |
| | | MLDAVGTLRLALKRHGDRARIARYLITDERTKPGGVKEKLDENGRIE |
| | | LLQDALIIWHGLFSSPRWRDDAAKQLWNEHIAKLVGEQNLVEVSED |
| | | ASGSERRTKQKQNREKLREAAKALVDDVALRQALHDMWKRRWEE |
| | | EDREWRRRLRWFKDWVLPRREQARKAYSRPAETGSSSHPKRRARY |
| | | AAIRRVGGLSLTRLATLTEFRRKVQVGFFTRLKPDGTKAEAKEGFGQ |
| | | STLDALEHLRAQRVKQLASRIVEAALGVGRIRRFPGVKNPKRPDTPV |
| | | DKPCHAIVIENLTHYRPEETRTRRENRQLMTWSSSKIKKYLAEACQLY |
| | | GLHLREVTAAYTSRQDSRTGAPGLRCQDVPVKEFMRSLFWRKEVA |
| | | QAEKKLTAGKGSSYERLLCELNQRWKDNSPGDGKRAELLRLPHKGG |
| | | EIFVSAAPDSPAARGLQADLNAAANIGLRALTDPDWPGKWWHVP |
| | | CNAVTFRPVEDKVKGSAAVKLDQSLRQVAHPQSKDPGAKKSKEIVN |
| | | LWCDISSLPLEHREWKLDWEPYPAYWNNVQCRVIRVLQGKV |
| 283 | Cas12b | MANAKVKTTTRSYTLSLNAPSDTTDRSPLWHRIFRTHYAICCGAREF |
| | | GKLLLDLRGGLPTSLAQLGEGIAENDRRQTQRGTRRILALGWLSVED |
| | | LDHARNDPHRVQDTAPGSPLDQDLAEKILRKILITKGIKSEEEQSNWI |
| | | SDCLPALTANIRPDAVWVNRAESFAQWQRGTQPGAQPPTPEEAQ |
| | | QILFSLCGESLVTLTLPEQPAAAGQKQPDQETSPDPEEQTDRPPAAP |
| | | SADDEMDPSNASRGIFGDLFGENAEGKRSRSQGKDNFACAVRDFL |
| | | CANPTPSADAITEFREKQKPREPNPPGPEKYPPEVSTSGAPTAVAKR |
| | | YRKLLVCAGLWPKSADEDGSSRNSAKTKFADPKEPQKTEIQINALDLI |
| | | DACNQAAPADDSGTSPKAGRVFAPAWASNIAEKVASATQMPANA |
| | | KSLNEFKRLMFALAARRFSQTQSWTRRNEAERHMAAARQDAAVA |
| | | RLREIDPDHKAQDWLRGYEQRRADQSGSNGEFRITRRMIGEAEAV |
| | | FKAWAGTNSAAERELKTVAVQTTAEKFGDAALYSEIARNTAAEAV |
| | | WRSGSAPEILDQWVKLRKAQSDQQRTRVPRFCHPNAFRHPTWCE |
| | | FGESSKPGVWYAWNPKSKPRKPEVGGEGDGTRRLWVLLPDFNSGI |
| | | GQAVPLRWRSKRLSKDLGEALQPSDAPIPRADRVSIAAAGLNLEGA |
| | | NGVPARYRPSLPFSENTKGWNARLQANRTALLHLESKWDAEAAT |
| | | WRDGGRSLLALKWFTTFSPELAMSEGPGRAIHPKLGWNSEPHSDL |
| | | NRAQKRGGNAKLILSRLPGLRVLSVDLGHRYAAACAVWETLTTEQ |
| | | MNAACQAKNHTQPAESDMYVHLAHPTERVVKSGRKKGQNLIQTT |
| | | VYRRIAADTLPDGTPHPAPWGRLDRQFLIKLQGEQRPTRAASKNEA |
| | | DLANALFHRLGLRSDADSENKSRAVDKLMARTVRVATLGLKRHARR |
| | | AKIAYALDPNTKAIPGMGGSSAAFTPGDEPHIHLLTDALFDWQSLAT |
| | | DAKWDDAHARSLWNHHIATLPGGFHLENPTPRDESAHEPSRQRQ |
| | | RSGDDALRATLKPIAEKLSKADRQEVHAAWKKYWGDSDGQSAIVP |
| | | KVLQGQRGPEKTTPSASASGWHGKIRWITDWIMGKYLEGCTGHA |
| | | WKHDVGGLSVSRITTMKSLYQLHKAFAMRATPEKPRGAPEKGESN |
| | | LGAAQGILTAMESMRQQRVKQLASRIAEAALGAGIERRSDNGREL |
| | | QRPRERVDDPRFAACHAVVVEDLTNYRPDEMQTRRENROLMQW |
| | | ASSKVKKYLSEACQLHGLYLRGVPAGYTSRQDSRTGAPGVRCGDIPV |
| | | EELMAAPRWRRQILTAEKTRRENNTGTARDRYILTLDEKYRLLTAEQ |
| | | RKKTPPARIPVKGGDLFVSADPDSPAASGIQADLNAAANIGLKALID |
| | | PDWPGRWWYIPCDATTHKPSPERTRGSAAVDCDVPLGPDSTGTPE |
| | | DRDAKPKKNQRNSKIAGRGQSAIINLWRDPTHLPIKENPSAWCESK |
| | | KYWNQVEHNVVKVIESKGQKLTQTAEAATGESASSPPIAPTDVPW |

[0087] Those skilled in the art will appreciate that, given that their amino acid sequences are known, these enzymes can readily be produced (e.g., through culturing of source organisms and/or by recombinant expression/purification, as, for example, may be contracted from any of a variety of commercial sources). Produced enzymes can then be assessed for direct and/or collateral cleavage at varying temperature(s) and/or for other evidence of stability and/or functionality at relevant temperature(s).

### Example 4: Thermostability of Cas13

[0088] This example confirms and further demonstrates the thermostability of Cas13 enzymes. This example provides certain thermostable Cas13 candidates for use in improved collateral activity assays as described herein. The thermostability of TccCas13a and ThpCas13a was tested. Briefly, varying ranges of labeled RNA target was incubated with TccCas13a or ThpCas13a; Rnase Inhibitor; T7 RNA Polymerase, MgCl2 and a cRNA (either in forward or reverse complement orientation). FIG. 3A demonstrates the significant activity of TccCas13a at 65° C. The data of FIG. 3A also suggests the structure of the cRNA can influence the activity of thermostable enzymes. Further, FIG. 3B demonstrates that TccCas13a is active across a wide range of temperatures including the range 40° C. to 65° C.

[0089] Additional assays were performed with TccCas13a with or without some components to identify parameters contributing to background within the assays. FIG. 3C demonstrates that presence of the complex of the Cas enzyme and a cRNA contributes to background in the assay.

### Example 5: Exemplary Discovery and Screening for Thermostable Cas Enzymes

[0090] The present example demonstrates an exemplary method of discovery and screening thermostable Cas enzyme candidates (e.g., Cas12 and Cas13 enzymes) (FIG. 4). Novel Cas12 and Cas13 enzymes were discovered using a custom-built in silico pipeline. In brief, publicly available microbial genomes and metagenome databases were first filtered on the basis of environmental metadata such as sample collection temperature and sequencing read quality. CRISPR repeats were subsequently identified in the filtered genomic datasets using published repeat annotation methods. Next, all coding sequences were annotated in genomes that had CRISPR repeats using published open-reading-frame (ORF) discovery methods, and these ORFs were subsequently classified using a Hidden Markov Model (HMIM) that was pre-trained on known Cas12 and Cas13 enzymes. An enzyme was annotated as a putative candidate if and only if its direct-repeats were conserved (>95%) and the predicted enzyme had a domain topology consistent with previously discovered enzymes.

[0091] Candidate enzymes were expressed by in vitro protein synthesis (e.g. PURExpress in vitro Protein Synthesis Kit by New England BioLabs) according to manufacturer's instructions. An initial pool of Cas12a candidate enzymes were assessed by endpoint (FIG. 5) and kinetic analyses (FIG. 6) using no template as a negative control for activity at 52° C. Each candidate was tested with three different guide/target pairs at 52° C. (FIG. 5).

[0092] A subset of candidates (e.g., 12 candidates) that demonstrated highest activity among the 44 initial candidates at 52° C. were selected in combination with their most efficient guide and target for further assessment at higher temperatures (e.g., 58° C., 60° C., 62° C.).

[0093] Both endpoint and kinetic analyses indicated a subset of candidate enzymes (e.g., 9 of 12 candidate enzymes) that displayed some activity at 58° C. Of the nine with some activity, five were classified as high activity (RS9, RS12, RS38, RS54, and RS56), and the remaining four were classified as lower activity (RS31, RS39, RS47 and RS50) (FIG. 7).

[0094] Both end point and kinetic analyses indicated a subset (e.g., 5 of 12 candidate enzymes) that displayed some activity at 60° C. Of the five with some activity, three were classified as high activity (RS50, RS56, and RS9), and the remaining two were classified as lower activity (RS28 and RS29) (FIG. 8).

[0095] Both end point and kinetic analyses indicated a subset (e.g., 2 of 12 candidate enzymes) that displayed some activity at 62° C. (RS9 and RS54) (FIG. 9).

[0096] While the refined list of 12 candidate enzymes were assessed at varying temperature, four priority candidate enzymes (RS10, RS28, RS38, and RS54) were purified and assessed for activity at varying temperatures (e.g., approximately 35° C. to approximately 65° C.). RS54 showed activity at LAMP temperatures (e.g., 61° C.) (FIG. 10).

[0097] A subset of Cas12a candidates were further examined using three different guide and target sets compared to no template control at both 58° C. and 70° C. (FIG. 11). Cas12bcdf was also assessed with all guide/target pairs at both 52 and 58° C. (FIG. 12). Kinetic analysis were also performed for Cas12a candidate, RS62, which showed activity at 52° C. (FIG. 13).

[0098] An initial pool of Cas13 candidate enzymes were assessed by endpoint analysis (FIG. 14) using no template as a negative control for activity at both 37° C. and 52° C. A single Cas13 candidate enzyme (RS73) was identified that displayed thermostability.

### Example 6: Exemplary Characterization of a Thermostable Cas12a Enzyme

[0099] The present example demonstrates characterization of an exemplary thermostable Cas12a enzyme, RS9. To determine whether RS9 required use of Thermostable Inorganic Pyrophosphatase (TIPP) for amplification of a target nucleic acid, real time detection of ORF1ab amplification was completed over a range of starting concentrations of ORF1ab (4.5 copies/4 to 4,500 copies/4) in the presence or absence of TIPP. An exemplary reaction included 30 ng/ul RS9, 112.5 XL-213 (ORF1ab guide), 1× HKFB (ORF1ab) primer set, 1× wsLAMP mix, 125 nM DNase Alert, with or without 1 U Thermostable Inorganic Pyrophosphatase (TIPP) with indicated viral RNA template concentration present. The exemplary reaction was incubated at 58° C. for 120 minutes on QS5 with detection in VIC channel. Real-time reactions that did not contain TIPP resulted in no statistically significant amplification of ORF1ab compared to the no template control regardless of the starting concentration of template. Real-time reactions that did contain TIPP, with the exception of that with a starting concentration of template at 4.5 copies/4, demonstrated significant amplification of ORF1ab compared to the no template control, suggesting RS9 requires use of TIPP for amplification (FIG. 15).

[0100] Specificity of RS9 was also assessed using real-time analysis. Amplification was conducted with a starting concentration of 4,500 copies/μL ORF1ab template and either primers and guides specific to ORF1ab or non-targeting primers with an ORF1ab guide. Each reaction condition was also conducted in the presence or absence of TIPP. An exemplary reaction included 30 ng/ul RS9, 112.5 XL-213 (ORF1ab guide), 1×HKFB (ORF1ab) or CFB (N) primer set, 1× wsLAMP mix, 125 nM DNase Alert, with or without 1 U Thermostable Inorganic Pyrophosphatase (TIPP), with 4,500 copies/μl viral RNA present. An exemplary reaction was incubated at 58° C. for 120 minutes on QS5 and detected in VIC channel. No amplification was detected for reactions containing non-targeting primers and/or no TIPP. Robust amplification was detected in reactions containing ORF1ab primers, an ORF1ab guide, and TIPP, indicating RS9 is specific for its target and requires TIPP for amplification (FIG. 16).

[0101] RS9 collateral cleavage activity was assessed using 100 nM of single stranded DNA target and DNaseAlert or RNaseAlert as reporters. A no target condition was utilized as a negative control. RS9 was unable to cleave DNaseAlert, resulting in intensity measurements significantly above no target control conditions. RS9 was able to cleave RNaseAlert, resulting in measured intensity similar to that of the no target control conditions, indicating RS9 has RNA-specific collateral cleavage activity (FIG. 17).

[0102] RS9 collateral cleavage activity was further evaluated alongside known Cas12a, LbaCas12a, using ORF LAMP product as target and either RNaseAlert, PolyrA, PolyrC, or PolyrU reporters. A no target condition was utilized as a negative control. Both RS9 and LbaCas12a were able to cleave RNaseAlert more efficiently than either PolyrA, PolyrC, or PolyrU (FIG. 18).

### Example 7: Exemplary Characterization of a Thermostable Cas13a

[0103] The present example demonstrates characterization of an exemplary thermostable Cas13a enzyme, TccCas13a. To determine optimal temperature for TccCas13a activity, a Cas reaction was conducted over a range of temperatures using 10 nM target and RNaseAlert as reporter. A no target condition was utilized as a negative control. Temperature profiles suggest TccCas13a shows highest activity at approximately 62° C. (FIG. 19).

[0104] To determine whether TccCas13a could be activated by ssDNA in addition to RNA, a Cas reaction was completed at 62° C. with RNaseAlert as a reporter. Different targets were utilized at different concentrations (e.g., 10 nM, 100 nM, or 1,000 nM ssDNA or 10 nM RNA). A no target condition was utilized as a negative control. Results indicated that TccCas13a can be activated by RNA, but cannot be activated by ssDNA even at the highest concentrations of ssDNA template at 62° C. (FIG. 20).

[0105] TccCas13a activation by ssDNA was also assessed at 58° C. TccCas13a was activated at 58° C. in the presence of 1 nM, 10 nM, and 100 nM RNA target compared to no target control, while TccCas13a activation by ssDNA at 58° C. was only detected when 100 nM or 1,000 nM of ssDNA target was utilized. 10 nM of ssDNA target at 58° C. showed no difference compared to no target control, suggesting TccCas13a activation requires a higher concentration of ssDNA than RNA, similar to that observed for LwaCas13 ssDNA activation. Interestingly, TccCas13a was not activated by ssDNA* at any concentration (10 nM, 100 nM, or 1,000 nM) compared to control (no target) (FIG. 21).

[0106] To determine whether TccCas13a showed different specific collateral activity to that of LwaCas13, a Cas reaction was done with two different reporters, RNaseAlert which contains multiple different bases (“NN”) and a “UU”-specific reporter with only two “UU” bases and a DNA backbone. Reactions were conducted at 60° C. LwaCas13a showed no preference for collateral activity of either reporter over the other, while TccCas13a showed increased collateral activity at “NN” sites compared to “UU” sites (FIG. 22).

### Example 8: Exemplary Characterization of Additional Candidate Thermostable Cas Enzymes

[0107] The present example demonstrates characterization of exemplary thermostable Cas enzymes, Pal1 (SEQ ID NO. 274), Pal2 low MW, Pal2 high MW (SEQ ID NO. 275), and Pal3 (SEQ ID NO. 276). Each enzyme was tested with four guides (designated as 342-353) at both 37° C. and 56° C. in a Cas-only reaction with DnaseAlert as a reporter. Fluorescence signal was plotted vs. time for each reaction (FIG. 23). Pal1 showed low activity for two guides at 56° C. No activity was observed for Pal2 low MW or Pal3, while activity was observed for two guides at 56° C. for Pal2 high MW. Pal1 and Pal2 activity at 56° C. is shown in FIG. 24. Additional results of studies with these enzymes are shown in FIGS. 25-30. As can be seen, Pal1 showed activity for 2 guides at 56° C. and 70° C.; Pal1 showed maximum activity at 57° C. and significant activity to at least 67° C. Pal2 high MW showed activity for 2 guides at 56° C.; Pal2 high MW also showed maximum activity at 47-52° C. and significant activity up to at least 57° C. No significant activity was observed for Pal2 low MW, or any of Pal3-6 at 37° C., 56° C., or 70° C. Those skilled in the art thus understand that these enzymes are thermostable at least at about 56° C. and/or within a range of 56° C. and 70° C. These particular exemplified enzymes may also be described as thermoactive as their relevant activity(ies) are dramatically reduced and/or undetected at lower temperatures such as at 37° C. Without wishing to be bound by any particular theory, it is noted that enzymes of thermophilic organisms often may show reduced (or undetectable) activity at such temperatures.

### EQUIVALENTS

[0108] Those skilled in the art will recognize, or be able to ascertain using no more than routine experimentation, many equivalents to the specific embodiments of the invention described herein. The scope of the present invention is not intended to be limited to the above Description, but rather is as set forth in the following claims:

The application's sequence listing, which the Patent Office published only in electronic form, follows.

SEQUENCE LISTING (294 sequences)

SEQ ID NO: 1 - protein, 1225 aa, Thermoclostridium caenicola
MKITKRKWGEHHPPLYFYRDEDSGRLLAQNDRKQDYTDTLFNDIAQDTFERSLRNRLLKTPEKGDKRFYSNEIVKLVEKLCQGADVAEIMKSMERNEKLRPKNEKEIKNLKKQLDGTLSEYGKRYTAPEGAMTLNDALFYLVEGNPLKQAMAKAELGKIREALIKEKENRINRVRYSIKNNKIPLRIQEDGGITPNNDRAAWLLGLMKPADPAKGITDCYPLLGELEEVFDFDKLSKTLHEKISRCQGRPRSIAMAVDEALKQYLRELWEKSPSRQQDLKYYFQAVQEYFKDNFPIRTKRMGARLRQELLKDKTSLSRLLEPKHMANAVRRRLINQSTQMHILYGKLYAYCCGEDGRLLVNSETLQRIQVHEAVKKQAMTAVLWSISRLRYFYQFEDGDILSNKNPIKDFRDKFLRDTNKYTHEDVEACKEKLQDFFPLKELQEKIKEDAKGLQETDNKQADTTDFKAIGHIVRDDRKLCNQLLAECVSCIGELRHHIFHYKNVTLIQALKRIADKVKPEDLSVLRAIYLLDRRNLKKAFAKRISSMNLPLYYREDLLSRIFKKEGTAFFLYSAKIQMTPSFQRVYERGKNLRREFECERMKAEASNGQNGQDGDRLKWFRQLAAGDSADTHFNWAVEAYAESAADVENNVEFDTDVDAQRALRNLLLLIYRHHFLPEVQKDETLVTGKIHKVLERNRQLSEGQGPNQGKAHGYSVIEELYHEGMPLSDLMKQLQRRISETERESRELAQEKTDYAQRFILDIFAEAFNDFLEAHYGEEYLEIMSPRKDAEAAKKWVKESKTVDLKTSIDEKEPEGHLLVLYPVLRLLDERELGELQQQMIRYRTSLASWQGESNFSEEIRIAGQIEELTELVKLTEPEPQFAEEVWGKRAKEAFEDFIEGNMKNYEAFYLQSDNNTPVYRRNMSRLLRSGLMGVYQKVLASHKQALKRDYLLWSEKHWNVKDENGADISSAEQAQCLLQRLHRKYAESPSRFTEEDCKLYEKVLRRLEDYNQAVKNLSFSSLYEICVLNLEILSRWVGFVQDWERDMYFLLLAWVRQGKLDGIKEEDVRDIFSEGNIIRNLVDTLKGENMNAFESVYFPENKGSKYLGVRNDVAHLDLMRKNGWRLEAGKTCSVMEDYINRLRFLLSYDQKRMNAVTKTLQQIFDRHKVKIRFTVEKGGMLKIEDVTADKIVHLKGSRLSGIEIPSHGERFIDTLKALMVYPRG

SEQ ID NO: 2 - protein, 1217 aa, Thalassospira profundimaris
MRIIKPYGRSHVEGVATEQPRRKLRLNTRPDISRDIPGFAQSHDALIIAQWISAIDKIATKPKPDQKPTQRQMNLRTTLGDAAWQHLMAKNLLPAAKDPAIREKLHLIWQSKIAPWGASRPQEEKRGKPTPKGGWYERFCGALSPEAITQNVARQIAKDIYDHLYVAAKRKGREPVKQGESSNKPGKFKPDRKLSLIEERAESIAKNALRPGTHAPCPWGQDDQAIYEQAGDVATKIYDDARDYLEDKKRRSGNRNTSSVQYLPRDLAVKILYAQYGRVFGPDTTIKAALDEQQSLFALHTAIKDCYHRLVNDARKRHILRILPRNMAALFRLVRAQYDNRDINALIRLGKVIHYHAGEQGKDEHHGIRDYWPSQQDIQNSRFWGSDGQADIKRHEAFSRIWRHIIALASRTLHDWADPDSQKFTGDDDDILMRAGAIESNVWDAGRYERKCDVLFGAQASLFCGAEDFEKATLKQAITGTGNLRNATFHFKGKARFENELQRLADDVPVDVQSAIAALWQKDAEGRTRQIAETLQAVLAGHFLSERQNRHILATLMAAMAQPGDVPLPRLRRVLARHDSICQRGRILPLPPCPDRAKLEESPALTCQYTVLKMLYDGPFRAWLAQQNSTILNHYIDSTIARTNKAAQDMNGRKLAPAEKDLITARAADIPRLSVDEKMVDFLGRLTAATATEMRVQRGYQSDGEKAQKQAGYIGEFECDVIARAFSDFLGQSGFDFVLKLKADTPKPDAAQCDVAALIAPGDVPALTPQAWQQVLYFILHLVPVDDASRLLHQTRKWQALEKKGKDKEVKKEKDKEVKKEDEKPDIADLQSVLMLYLDMHDAKFTGGAALHGIEKFAEFFVEKADFRAVFPPQSLQDQDRSIPRRGLREIVRFGHLPLLQHMSGTVKITHDNVVAWQTARTPDATGTSPIARRQKQREELHALAVERPARFRNADLHNYMHALVDVIKHRQLSAQVTLSDQVRLHRLMMGVLGRLVDYAGLWERDLYFVLLALLYHHGVTPDDVLKGQGKRKLADGQVVEALKPKNRKAAAPVGVFDDLDHYGIYQDDRQSIRNGLSHFNMLRGGTAPDLSHWVNQTRRLVAHDRKLKNAVAKSVIEMLAREGFDLDWTIEPDSGKHILRHGKIRTRQAQHFQKSRIRIEKKSAKPDKNDTVKIRENLHGDAMVERVARLFAARAQKYRDITTEKRLDHLFLKPKG

SEQ ID NO: 3 - protein, 1129 aa, Alicyclobacillus acidoterrestris
MAVKSIKVKLRLDDMPEIRAGLWKLHKEVNAGVRYYTEWLSLLRQENLYRRSPNGDGEQECDKTAEECKAELLERLRARQVENGHRGPAGSDDELLQLARQLYELLVPQAIGAKGDAQQIARKFLSPLADKDAVGGLGIAKAGNKPRWVRMREAGEPGWEEEKEKAETRKSADRTADVLRALADFGLKPLMRVYTDSEMSSVEWKPLRKGQAVRTWDRDMFQQAIERMMSWESWNQRVGQEYAKLVEQKNRFEQKNFVGQEHLVHLVNQLQQDMKEASPGLESKEQTAHYVTGRALRGSDKVFEKWGKLAPDAPFDLYDAEIKNVQRRNTRRFGSHDLFAKLAEPEYQALWREDASFLTRYAVYNSILRKLNHAKMFATFTLPDATAHPIWTRFDKLGGNLHQYTFLFNEFGERRHAIRFHKLLKVENGVAREVDDVTVPISMSEQLDNLLPRDPNEPIALYFRDYGAEQHFTGEFGGAKIQCRRDQLAHMHRRRGARDVYLNVSVRVQSQSEARGERRPPYAAVFRLVGDNHRAFVHFDKLSDYLAEHPDDGKLGSEGLLSGLRVMSVDLGLRTSASISVFRVARKDELKPNSKGRVPFFFPIKGNDNLVAVHERSQLLKLPGETESKDLRAIREERQRTLRQLRTQLAYLRLLVRCGSEDVGRRERSWAKLIEQPVDAANHMTPDWREAFENELQKLKSLHGICSDKEWMDAVYESVRRVWRHMGKQVRDWRKDVRSGERPKIRGYAKDVVGGNSIEQIEYLERQYKFLKSWSFFGKVSGQVIRAEKGSRFAITLREHIDHAKEDRLKKLADRIIMEALGYVYALDERGKGKWVAKYPPCQLILLEELSEYQFNNDRPPSENNQLMQWSHRGVFQELINQAQVHDLLVGTMYAAFSSRFDARTGAPGIRCRRVPARCTQEHNPEPFPWWLNKFVVEHTLDACPLRADDLIPTGEGEIFVSPFSAEEGDFHQIHADLNAAQNLQQRLWSDFDISQIRLRCDWGEVDGELVLIPRLTGKRTADSYSNKVFYTNTGVTYYERERGKKRRKVFAQEKLSEEEAELLVEADEAREKSVVLMRDPSGIINRGNWTRQKEFWSMVNQRIEGYLVKQIRSRVPLQDSACENTGDI

SEQ ID NO: 4 - protein, 1147 aa, Alicyclobacillus kakegawensis
MAVKSIKVKLRLSECPDILAGMWQLHRATNAGVRYYTEWVSLMRQEILYSRGPDGGQQCYMTAEDCQRELLRRLRNRQLHNGRQDQPGTDADLLAISRRLYEILVLQSIGKRGDAQQIASSFLSPLVDPNSKGGRGEAKSGRKPAWQKMRDQGDPRWVAAREKYEQRKAVDPSKEILNSLDALGLRPLFAVFTETYRSGVDWKPLGKSQGVRTWDRDMFQQALERLMSWESWNRRVGEEYARLFQQKMKFEQEHFAEQSHLVKLARALEADMRAASQGFEAKRGTAHQITRRALRGADRVFEIWKSIPEEALFSQYDEVIRQVQAEKRRDFGSHDLFAKLAEPKYQPLWRADETFLTRYALYNGVLRDLEKARQFATFTLPDACVNPIWTRFESSQGSNLHKYEFLFDHLGPGRHAVRFQRLLVVESEGAKERDSVVVPVAPSGQLDKLVLREEEKSSVALHLHDTARPDGFMAEWAGAKLQYERSTLARKARRDKQGMRSWRRQPSMLMSAAQMLEDAKQAGDVYLNISVRVKSPSEVRGQRRPPYAALFRIDDKQRRVTVNYNKLSAYLEEHPDKQIPGAPGLLSGLRVMSVDLGLRTSASISVFRVAKKEEVEALGDGRPPHYYPIHGTDDLVAVHERSHLIQMPGETETKQLRKLREERQAVLRPLFAQLALLRLLVRCGAADERIRTRSWQRLTKQGREFTKRLTPSWREALELELTRLEAYCGRVPDDEWSRIVDRTVIALWRRMGKQVRDWRKQVKSGAKVKVKGYQLDVVGGNSLAQIDYLEQQYKFLRRWSFFARASGLVVRADRESHFAVALRQHIENAKRDRLKKLADRILMEALGYVYEASGPREGQWTAQHPPCQLIILEELSAYRFSDDRPPSENSKLMAWGHRGILEELVNQAQVHDVLVGTVYAAFSSRFDARTGAPGVRCRRVPARFVGATVDDSLPLWLTEFLDKHRLDKNLLRPDDVIPTGEGEFLVSPCGEEAARVRQVHADINAAQNLQRRLWQNFDITELRLRCDVKMGGEGTVLVPRVNNARAKQLFGKKVLVSQDGVTFFERSQTGGKPHSEKQTDLTDKELELIAEADEARAKSVVLFRDPSGHIGKGHWIRQREFWSLVKQRIESHTAERIRVRGVGSSLD

SEQ ID NO: 5 - protein, 1108 aa, Bacillus hisashii
MATRSFILKIEPNEEVKKGLWKTHEVLNHGIAYYMNILKLIRQEAIYEHHEQDPKNPKKVSKAEIQAELWDFVLKMQKCNSFTHEVDKDEVFNILRELYEELVPSSVEKKGEANQLSNKFLYPLVDPNSQSGKGTASSGRKPRWYNLKIAGDPSWEEEKKKWEEDKKKDPLAKILGKLAEYGLIPLFIPYTDSNEPIVKEIKWMEKSRNQSVRRLDKDMFIQALERFLSWESWNLKVKEEYEKVEKEYKTLEERIKEDIQALKALEQYEKERQEQLLRDTLNTNEYRLSKRGLRGWREIIQKWLKMDENEPSEKYLEVFKDYQRKHPREAGDYSVYEFLSKKENHFIWRNHPEYPYLYATFCEIDKKKKDAKQQATFTLADPINHPLWVRFEERSGSNLNKYRILTEQLHTEKLKKKLTVQLDRLIYPTESGGWEEKGKVDIVLLPSRQFYNQIFLDIEEKGKHAFTYKDESIKFPLKGTLGGARVQFDRDHLRRYPHKVESGNVGRIYFNMTVNIEPTESPVSKSLKIHRDDFPKVVNFKPKELTEWIKDSKGKKLKSGIESLEIGLRVMSIDLGQRQAAAASIFEVVDQKPDIEGKLFFPIKGTELYAVHRASFNIKLPGETLVKSREVLRKAREDNLKLMNQKLNFLRNVLHFQQFEDITEREKRVTKWISRQENSDVPLVYQDELIQIRELMYKPYKDWVAFLKQLHKRLEVEIGKEVKHWRKSLSDGRKGLYGISLKNIDEIDRTRKFLLRWSLRPTEPGEVRRLEPGQRFAIDQLNHLNALKEDRLKKMANTIIMHALGYCYDVRKKKWQAKNPACQIILFEDLSNYNPYEERSRFENSKLMKWSRREIPRQVALQGEIYGLQVGEVGAQFSSRFHAKTGSPGIRCSVVTKEKLQDNRFFKNLQREGRLTLDKIAVLKEGDLYPDKGGEKFISLSKDRKCVTTHADINAAQNLQKRFWTRTHGFYKVYCKAYQVDGQTVYIPESKDQKQKIIEEFGEGYFILKDGVYEWVNAGKLKIKKGSSKQSSSELVDSDILKDSFDLASELKGEKLMLYRDPSGNVFPSDKWMAAGVFFGKLERILISKLTNQYSISTIEDDSSKQSM

SEQ ID NO: 6 - protein, 1090 aa, Laceyella sediminis
MSIRSFKLKIKTKSGVNAEELRRGLWRTHQLINDGIAYYMNWLVLLRQEDLFIRNEETNEIEKRSKEEIQGELLERVHKQQQRNQWSGEVDDQTLLQTLRHLYEEIVPSVIGKSGNASLKARFFLGPLVDPNNKTTKDVSKSGPTPKWKKMKDAGDPNWVQEYEKYMAERQTLVRLEEMGLIPLFPMYTDEVGDIHWLPQASGYTRTWDRDMFQQAIERLLSWESWNRRVRERRAQFEKKTHDFASRFSESDVQWMNKLREYEAQQEKSLEENAFAPNEPYALTKKALRGWERVYHSWMRLDSAASEEAYWQEVATCQTAMRGEFGDPAIYQFLAQKENHDIWRGYPERVIDFAELNHLQRELRRAKEDATFTLPDSVDHPLWVRYEAPGGTNIHGYDLVQDTKRNLTLILDKFILPDENGSWHEVKKVPFSLAKSKQFHRQVWLQEEQKQKKREVVFYDYSTNLPHLGTLAGAKLQWDRNFLNKRTQQQIEETGEIGKVFFNISVDVRPAVEVKNGRLQNGLGKALTVLTHPDGTKIVTGWKAEQLEKWVGESGRVSSLGLDSLSEGLRVMSIDLGQRTSATVSVFEITKEAPDNPYKFFYQLEGTELFAVHQRSFLLALPGENPPQKIKQMREIRWKERNRIKQQVDQLSAILRLHKKVNEDERIQAIDKLLQKVASWQLNEEIATAWNQALSQLYSKAKENDLQWNQAIKNAHHQLEPVVGKQISLWRKDLSTGRQGIAGLSLWSIEELEATKKLLTRWSKRSREPGVVKRIERFETFAKQIQHHINQVKENRLKQLANLIVMTALGYKYDQEQKKWIEVYPACQVVLFENLRSYRFSYERSRRENKKLMEWSHRSIPKLVQMQGELFGLQVADVYAAYSSRYHGRTGAPGIRCHALTEADLRNETNIIHELIEAGFIKEEHRPYLQQGDLVPWSGGELFATLQKPYDNPRILTLHADINAAQNIQKRFWHPSMWFRVNCESVMEGEIVTYVPKNKTVHKKQGKTFRFVKVEGSDVYEWAKWSKNRNKNTFSSITERKPPSSMILFRDPSGTFFKEQEWVEQKTFWGKVQSMIQAYMKKTIVQRMEE

SEQ ID NO: 7 - protein, 1133 aa, Unknown
  Description of Unknown: Cas12 sequence
MFKKKLFDDEEFISLAQNQEESNALNAFKGFTTHFKDFQENRKNMYSEDKESTAIAYRIIHENLPVFITNNIRFEKIINELDRSNIHSIEKELKEELANNKLKDIFNIEYFQNTLTQNDITRYNTIIGGKVKADGKKVQGLNEYINLFNQHNKDKKLPLLKPLYKQILSEENSASFIVPAFEKDNEVLQSIFDFWNKCIIDAKGPISGKKYNLLSKIQSLLQNLDKLKNNQLEEMYFENENLSTISNDVYGQWNLIRDALGNFYNSIDAKKNKKDYYSWKEIQDALVYYKQTNDEYKDIDQKAFLIYFKEMKVNDGEENTNNNIINLINERYKRIEPLLKEDRDNRKDLHQDKGKVAIIKEFLDSLKLLQNTIKLLYVDDSLDNMNYDFYNQLTDYYETLRPLNTLYNRVRNYMTRKPFSEEKFVLTFNSPTLLDGWDLNKEEANLGVILRKDNKYYLGIMNKGDNKIFKKYDEEPGDDYYEKMVYKLLPGPNRMLRKVFFSNKNIEYYKPNQDIQNLYNKGEFKKGESLNKESLHKLIDFYKNSISKNGDWSVFNFKFKKTTAYDDISQFYKDVENQGYKLFFKTIKTSYIDQLVNEGKLYLFQIYNKDFSENKKRKDESNPNLHTIYFKNLFSEDNLKNVVYKLNGKAEVFYRKKSIEYPEEIRRKGHHYNELKDKFDYPIIKDKRYSEDKFLFHVPITLNFLAKSDEKVNEMVKNYIAATNEKIHIIGIDRGERNLLYLSLIDSNGNIVKQQSLNIIELPKYQKQIDYHAKLNEKEKQRLAARQNWDVIENIKELKEGYLSQVIHQIARLMVDYKAILVMEDLNFGFKRGRFKVEKQVYQKFEKMLIDKLSYLVFKEKNLCEPGGSLRAYQLSAPFKSFKALGKQSGMIFYVPAQYTSKIDPTTGFYNFLNIDVSNLARSKETFSKFDKIVYNKKEDYFEFYCKMINFESANQLTKKSQNKANAELKEFQWILCSTHHDRFKVERKNNQINYCKINVNEELKKLLNSKGINYEKSNDLKSEILNIDESKFFKELGYLLKILVSLRYNNGKKGSEEQDFILSPVKNASGKFFCTLDNNNTLPLDADANGAYNIALKGLMIVQRVKAGGKLDLSISKDDWINFLIMNKKLPK

SEQ ID NO: 8 - protein, 1352 aa, Unknown
  Description of Unknown: Cas12 sequence
MSNQSVFKDFTNLYELSKTLRFELKPVGKTLRMLEDAKVFKTDELIQKKYEQTKPFINKLHQEFVKESLEGRSLEGLESYQDILKEWQKDKKDKIAQKNLGIKEKELYKQVTQLFNAKAKEWSEPYAHLGLKKKDIGILFEEGVFKILKEKYNNDKDAKITNKVTGEIFFEDFWKGFVGYFQKFFETRKNFYKDDGTSTAIATRIVAQNLKRFCDNIGLFEKIKDQIDSSEVEQSFGISMEKVFSLDFYNQCLLQGGIDKYNEILGGKTLENGEKFKGINELINKYRQDNKGDKSSFLKILDKQILSEKESFIDEIKNDKELEETLKNLHETAKVKTKIFGTLFEDFIGNNTKYDLAKIYISKEAFNTISHKWTGGTDLFAENLFNALKDEQILKSSAKKKDGSYVFPDFIEFLHIKTALENVPKDINFWKERYYVNKEGENKEFFLGNGEIWQQFLQIFNFEFNELFQKEIIDNQTGKKMHIGYKVYKEEISKLLEDFKVDKDSTVIIKHFADSVLWIYQMAKYFALEKKRTWRDEYDLDTFYTDPKNGYLAFYENAYEEIVQIYNKLRNYLTKKPYSTEKWKLNFQNSTLASGWDKNKEADNFTVILRKDGKYFLGLMRKGANKLFDKRYGSEFSQGLEKGKYEKMNYKYFPSPSKMIPKTSTQVHEVKKHFKNSSEPFFLEESSSLGKFIKQLKITKEVFDLNNFEYKKSYLSTLNGESPDESQRVKADSKKTGQVKLFQKEFLNLSQNELLYKKSLFAWVDFCKEYLDCFPSTGDGFLQFKKYIQDTEKYESIDQFYKDIERGGYKISFQNISEEYISCKNQNSELYLFKIHNKDWNLKDGKPKTGMKNLHTMYFESLFSSENIAQNFPMKLNGQAEIFYRPKTDINKLEMKKDSKGKNVVDHKRYEEDKIFFHLPMTLNRGKSLFNFNVQLNNFLADNPEINIIGVDRGEKHLAYYSVINQNQEILDGGTLNVVKGGNGKDIDYHKKLEDKAEKREQARKDWQDVEGIKDLKKGYISQVVRKLADLAIEHNAIIVFEDLNMRFKQIRGGIEKSVYQQLEKALIEKLSFLVRKNEKNPEEAGYLLKAYQLSAPFETFQRIGKQTGIIFYTQASYTSKIDPLTGWRPNLYLKYSNAKKAKADISKFSEIEFINNRFEFTYDLQEFRSQKDKKKEYPKKTLWTLCSSVERYRWNRKLNDNKGGYEHYSDLTSDFKKLFKKYNININEDILGQIENMDTDDRKNNARFFSGFMFFWNLICQIRNTNSDVISGESDNDFILSPVEPFFDSRKASQFGSDLPENGDDNGAFNIARKGIMILKKISQYVEENENCDKLKWGDLYISHTDWDNFI

SEQ ID NO: 9 - protein, 921 aa, Unknown
  Description of Unknown: Cas12 sequence
MTNYTDFIGLYPVQKTLRFELRPQGKTAEKMRESGLLEQDREKAKNYIVMKALIDDYHRRFINELLEKASFDWQPLFEALNNVKVNKDDKSKKELEKEQLHMRKELIGLFEKDERFKYLFSEKLFSELLNKEISERNDPDEMEAMRSFDRFSGYFIGFHENRRNIYSNEDKHNSLAYRVVAENFPKFADNCRKYSLIKENMQEAVVEFKKEIASVVDIDVDQMFDISYFNKVLTQKGIDDYNTMLGGVSEEGSVKIRGLNEFLNLYYQKVTDNKRIKMAPLYKQILCESKTKSFIPYMFENDEEVISSINQYYDSVKYDILQRSVYLLSNYKEYDASKIFIDQKSISSISIVLFGSWETLGGLMQIYKADQIGDPGLEKTRKKVDKWLSSSYFTLKEVFEAIGEQDPFRVYVEKLSLVLKNIEEFDKSCLLEGTHFSGDELLTQDIKGFLDLLMEVQHLMKPFNAKEDLDKDAAFYSEYNEIYEALSEIIPLYNKVRNYATKKKYSTYKIKMNFGNPTLAAGWDLNKERDNTAVILLRGNNYYLGIMNPKKKTKFEELPSGEDNDCYRKMVYKLLPGPNKMLPKVFFSKKGIGTFNPSKEILEGYETGKHKLGDSFDIDYCHSLIDFFKENIPKYGDWGTYEFKFSPTEEYSDISQFYKEVSEQGYKITFQNISRKAIDDLVNNGALFLYQIYNKDFSEHSKGKNNLHTMYWKAAFSEENLRNVVIKINGEAELFYRDKSDISKTEHSAGTILVNRTDRKDNPIPNSIYYELFKYKTGQIKSVSDEAKQYLDDLVTHEAKYPITKDRRYTEDRMFFHIPITLNFGSSGNTNINKAVIDHVLNSKDVHIIGIDRGERNLLYVSVIDRKGNIIKQRSLNVIDGIDYHEKLDQREKENISARKSWSNVEKIKDLKEGYLSYVIH

SEQ ID NO: 10 - protein, 1238 aa, Unknown
  Description of Unknown: Cas12 sequence
MKDFYQFTNLYALSKTLRFSLIPTPATKQMLEDAKVFEKDETIQKKYEATKPYFDRLHREFALEALQDQKLDFKNYLELYRKYKADKKASGKLLINIEKDLRKEVVKLFDKQGEKWAKQYPGLKNKNIGVLFKEAVFTVILKERYGNEKETQILDESSGQLVSIFDSWKGFIGYFKKFHETRKNFYKDDGTSTALATRIIDQNLKRFCDNILIFESTKEKVDFSEVEISFGKPLSEVFTLEFYNTCFLQNGIDFYTKILGGETLQNGEKVKGLNECINLHKQKTGEKLPFFKSLDKQILSEKDKFFIDEISNETQLLEVLKSFVASAESKTDTIKTLVDDFVKDQDKYDLNYIYFSNDGLNTITRKWTTETQVFEEALYTALKAAKVVSSSAKKNEGGYSFPDFIPFAHLKTALESIKIDGTIWRDNFNAIENFEEKSIWAQFLAIYNFELSNLFETEIKNPEIGNCPTIGYNVYKQDFEELLKSFVYDPNAKVTIKNFADNVLSIYQMAKYFAVEKKRGWNTDYELDVFYTDPQNGYLQYYENAYEEIVQVYNKLRNYLTKKPYSEEKWKLNFDSGTPIKYTTRAIIFNNTTNERYYLGLLKKGVAKPREFEPINNNIISSGEFRRMIIQQLKFQTLAGKGYVRDFGVKYSEDKDGVKHLQQLIKKQYLSKYPCLKKIADGVYNDKKAFDADIKDVLLETYNLDFQPISEEFILNKNRLGEIYLFEIHNKDWNLKDGKNKSGSKNLHTMYFESLFVDKTTFKLNNEGAEVFYRPATNEGKLGTKKDRNGKIIINHKRYATDKILFHCPIGLNKDAGKSYTFNAKINNMLANNPDINIIGVDRGEKHLAYYSVITQKGKILDRGSLNKVEGGDKQEIDYAKKLEETAKNREQARKDWQAVEGIKDLKRGYISQVVRKLADLAIEHNAIIVFEDLNMRFKQIRGGIEKSVYQQLEKALIDKLSFLVMKGEADPEKAGHLLKAYQLVAPFESFQSMGKQTGIIFYTQANYTSKIDPITGWRPNLYLKYTSAEKAKADILKFSKIEFVNNRFELTYDIKNFVLDKKVVLSNKTKWTVCSSVERFRWNRRLESNQGNYEHYENLTENLSSLFKDFGFEIEQNIIRQVEQLATKGNEQFFRSFIFYVNLIFQIRNTDAKAKDQNKEDFILSPVEPFFDSRTPEKFGENLPENGDDNGAFNIARKGIIMLNKISAYKQEVGNVDKIIWKDLFISAAEWDNFTQE

SEQ ID NO: 11 - protein, 1301 aa, Unknown
  Description of Unknown: Cas12 sequence
MDSYEQFTKLYPIQKTIRFELKPQGRTKEHFDNSNFLEKDRERDDNYKILKEVIDDYHREFIDECLSNIQLNWDDLKKFSEEYRRSKEKKNNRDSESEQKRMSTTSETRAINKKNLEAEQKRMRGEIVSAFKKDDRFKHLFSEKLFSILLKNQIYEKGTLEEIEAFDCFNKFSGYFKSFHENRKNMYSDEDKETAISYRIINENFPKLLDNFEKYQYVCREYPEQIREAESTLAEAGCYIKMDEIFSIDNFNNVMMQGGKESGISRYNLAIGGIVQGTGEKPKGLNEFLNLAYQNEPNGRKKIRMEPLYKQILSKEESFSYRLEAFTDDSQLLSAIRSFFDIVEKDKNGNIFDRAVNLMSSFSNYDTSKIYIRKAYLNQVSKEIFGYRGKSDSKPAKTADESLNKSGGWEKLGQMLRDYKADSIGDRNLEKTCKKVDKWLDSDEFTLSDILGAISLAGSNETFEAYVSEICVARRNIDKEKEKEKNINVEKISGDTESIQIIKALLDSVQEFFHLLSPFQLHPNTPHDWTFYAEFNDIYDKLSAITPLYNQARNHLTKKNLDTSKIKLNFNNPTLANGWDVNKEYENTAVILIRDGKYYLGIMNPKNKRKIKFDEGSGAGPFYQKMVYKLLPGPYRMLPKVFFAKKNIDYYNPSQEIREGYKAGKHKKGKEFDKGFCHKLIDFFKESIQKNENWKVFDFKFSPTESYDDISEFYQEVEKQGYRMYFVNIPSDTIDRYVEGGDMFLFQIYNKDFAKGAKGNKDMHTLYWNAVFSEENLQKGVMKLSGEAELFYRKKSDIKDPPHREGEILVNRTYIDRTHVSGVMGEQNTVKESRIPVPDEIHKNLFDYYNHGRELTKEEKEYCDKVGSFKAYYGIVKDRRYLENKMYFHVPLTLNFKAIGEKRINKMAIEKFLTDENACIIGIDRGERNLLYYSIIDRNGKIIDQKSLNVIDGFDYHEKLSQRQTEREVARQSWNSIGKIKDLKEGYLAKAVHEISKMAIKYNAIVVLEDLHFGFKKGRLKVEKQIYQKFEEMLINKLNYLVFKDVSDSSDAGGVLNAYQLTAPLESFSKLGKQSGILFYVPAAFTSVIDPTTGFVDLFNSSSITSTQKKKEFLQRFESIVYSARDGGIFAFTFDYRNFSKIATDHRNMWTVYTHGERIRYVRDEKCYKTTDPTKRIKEALSGIEYDDGSDIRDKITQSGDNNLINTVYHSFMDTIKMRNKDGRIDYIISPVKNRNGEFFRSDYKHRDFPVDADANGAYHIALKGELLMRMIGKTYDSNSDKMPKLEHKDWFEFMQTRGDQ

SEQ ID NO: 12 - protein, 1368 aa, Unknown
  Description of Unknown: Cas12 sequence
MKKEKEFKSFGDFTNLYEISKTLRFELKPVENTQTMLDEADVFGKDKVIKDKYTKTKPFIDKLHREFVDESLKDVSLSGLKKYSEVLENWKKNKKDKDIVKELKKEEERLRKEVVEFFDNTAKKWANEKYKELGLKKKDIGILFEESVFDLLKEKYGEEQDSFLKEEKGDFLKNEKGEKVSIFDEWKGFVGYFTKFQETRKNFYKNDGTETALATRIIDQNLKRFCDNIDDFKKIKNKIDFSEVEKNFNKTADVFSLDFYNQCLLQKGIDSYNEFIGGKTLENGKKLKGVNELVNEYRQKNKNEKVSFLKLLDKQILSEKEKLSFGIENDEQLLVVLNSFYETAEEKTKILRTLFGDFVEHNENYDLDKTYISKVAFNTISHKWTNETHKFEELLYGAMKEDKPIGLNYDKKEDSYKFPDFIALGYLKKCLNNLDCDTKFWKEKYYENNADKKDKDKGFLTGGQNAWDQFLQIFIFEFNQLFNSEAFDNKGKEIKIGYDNFRKDFEEIINQKDFKNDENLKIAIKNFADSVLWIYQMAKYFAIEKKRGWDDDFELSEFYTNPSNGYSLFYDRAYEEIVQKYNDLRNYLTKKPYKEDKWKLNFENPTLANGFDKNKESDNSTVILRKKRKYYLGLMKKGNNKIFEDRNKAEFIRNIESGAYEKMAYKYLPDVAKMIPKCSTQLNEAKNHFRNSADDLEIKKSFSNPLKITKRIFDLNNIQYDKTNVSKKISGDNKGIKIFQKEYYKISGDFDVYKSALNDWIDFCKDFLSKYDSTKDFDFSILRKTKDYKSLDEFYVDVAKITYKISFTPVSESYIDQKNKNGELYLFEIYNQDFAKGKMGAKNLHTLYFENVFSPENISKNFPIKLNGNAELFFRPKSIESKKEKRNFVREIVNKKRYSEDKIFFHCPITLNRETGSIYRFNNYVNNFLSENNINIIGVDRGEKHLAYYSVIDKNGVKIGGGSFNEINKVDYAKKLEERAGEREQSRKDWQVVEGIKDLKKGYISQVVRELADLAIKHNAIIVLEDLNMRFKQIRGGIEKSIYQQLEKALIDKLSFLVEKGEKDPNQAGHILKAYQLAAPFTSFKDMGKQTGIVFYTQASYTSKTCPNCGFRKNNNKFYFENNIGKAQDALKKLKTFEYDSENKCFGLSYCLSDFANKEEVEKNKNKKRNNAPYSDIEKKDCFELSTKDAVRYRWHDKNTERGKTFFEGESVYEEKEEKEIGQTKRGLVKEYDISKCLIGLFEKTGLDYKQNLLDKINSGKFDGTFYKNLFNYLNLLFEIRNSISGTEIDYISCPECQFHTDKSKTIKNGDDNGSYNIARKGMIILDKIKQFKKENGSLDKMGWGELFIDLEEWDKFAQKKNNNIIDK

SEQ ID NO: 13 - protein, 1285 aa, Unknown
  Description of Unknown: Cas12 sequence
MKSFDSFTNLYSLSKTLKFEMRPVGNTQKMLDNAGVFEKDKLIQKKYGKTKPYFDRLHREFIEEALTGVELIGLDENFRTLVDWQKDKKNNVAMKAYENSLQRLRTEIGKIFNLKAEDWVKNKYPILGLKNKNTDILFEEAVFGILKARYGEEKDTFIEVEEIDKTGKSKINQISIFDSWKGFTGYFKKFFETRKNFYKNDGTSTAIATRIIDQNLKRFIDNLSIVESVRQKVDLAETEKSFSISLSQFFSIDFYNKCLLQDGIDYYNKIIGGETLKNGEKLIGLNELINQYRQNNKDQKIPFFKLLDKQILSEKILFLDEIKNDTELIEALSQFAKTAEEKTKIVKKLFADFVENNSKYDLAQIYISQEAFNTISNKWTSETETFAKYLFEAMKSGKLAKYEKKDNSYKFPDFIALSQMKSALLSISLEGHFWKEKYYKISKFQEKTNWEQFLAIFLYEFNSLFSDKINTKDGETKQVGYYLFAKDLHNLILSEQIDIPKDSKVTIKDFADSVLTIYQMAKYFAVEKKRAWLAEYELDSFYTQPDTGYLQFYDNAYEDIVQVYNKLRNYLTKKPYSEEKWKLNFENSTLANGWDKNKESDNSAVILQKGGKYYLGLITKGHNKIFDDRFQEKFIVGIEGGKYEKIVYKFFPDQAKMFPKVCFSAKGLEFFRPSEEILRIYNNAEFKKGETYSIDSMQKLIDFYKDCLTKYEGWACYTFRHLKPTEEYQNNIGEFFRDVAEDGYRIDFQGISDQYIHEKNEKGELHLFEIHNKDWNLDKARDGKSKTTQKNLHTLYFESLFSNDNVVQNFPIKLNGQAEIFYRPKTEKDKLESKKDKKGNKVIDHKRYSENKIFFHVPLTLNRTKNDSYRFNAQINNFLANNKDINIIGVDRGEKHLVYYSVITQASDILESGSLNELNGVNYAEKLGKKAENREQARRDWQDVQGIKDLKKGYISQVVRKLADLAIKHNAIIILEDLNMRFKQVRGGIEKSIYQQLEKALIDKLSFLVDKGEKNPEQAGHLLKAYQLSAPFETFQKMGKQTGIIFYTQASYTSKSDPVTGWRPHLYLKYFSAKKAKDDIAKFTKIEFVNDRFELTYDIKDFQQAKEYPNKTVWKVCSNVERFRWDKNLNQNKGGYTHYTNITENIQELFTKYGIDITKDLLTQISTIDEKQNTSFFRDFIFYFNLICQIRNTDDSEIAKKNGKDDFILSPVEPFFDSRKDNGNKLPENGDDNGAYNIARKGIVILNKISQYSEKNENCEKMKWGDLYVSNIDWDNFVTQANARH

SEQ ID NO: 14 - protein, 1366 aa, Unknown
  Description of Unknown: Cas12 sequence
MNTQKKEFNPKSFKDFTNLYSLNKTLRFSLTPNKKTAEILEFNKQKEVKCFSNDRKIAGAYQEIKKYLNKLHQEFIQEAMKFFAFSEEELKGFEKEYLNLLNFTDKDNFKKKNKIRNEYEQERKILTIKIATYFSKFKSEKYQSFNLANITGKKVFSILEQKYKEDKKTLKIIHIFKYKPTKDEKKEGEAVNFSTYLTGFNENRKNFYKSEDKAGQFATRTIDNLAQFIKNKKLFEDKYQKNYSKIGILDEQIKIFNLDYFNNLFLQEGLDEYNGILGNNKGEENKSNEGINQKINIFKQKEKARLKKEKENFNKSDFPLFKELYKQIGSIRKENDVYVEIKTDKELVEELNNFPKNVENYLKDIQSFYKTFFEKLQNEEYELDKIYLPKSVGTYFSYIAFSDWNKLAFIYNKRYKNEKIKIVEGGDVNVQYRSLEVLKNRIDELKDEDNLNFNKFFIDKLKFNEAKKENNWQNFWFCIEYYINSQFIGGEKNILNKEKNEYEILPFGSLKELKEKYFEAVKKYKEKMVDTESGLTDDEEKEIKETLKNYLDRIKEIERIAKYFDLKKSFEEIKQEDLDSNFYGEYQKVVDKTNELKIYQYYSEFRNYLTQNNSVEEKIKLNFNSGLLLDGWDLNKEKVKFSIIFQENGKYYLGIINKEKDKTILDKDKHPEIFTKNSDFRKMEYKLFPSPSKMLPKISFSETAKKGDEDVGWSEEIQKIKDEFAEFQEYKKKSKDNWKDEFNRGKLNKLIDYYKQVLEKHSEGYMNTYNFELKDSSKYKNLGEFNDDIARQNYKVKFVGIDKNYIDEKVANGELFLFQIYNKDFSEDKKEGSTNNLETIYFKELFSKENLENPVFKLSGGAEMFFRNKIEKKKEKKKLDKDGKPMISKKGEKVVDKRRFSENKILFHLPIEINYGKGKMPNFNKKINEYISKNPENIKIIGIDRGEKHLLYYSIIDQNGNNIESMSLNAVDEFGNFVNPEKLEEYEIDNNGKKERRWKYIVNDKEIKVTNYQRKLDELEKERQKSRQSWQNINKIKNLKKGYISFVVKKIVDLAIENNAIIILEDLNFGFKSFRQKIEKNVYQQFEKALIDKLGFVVDKQKQNQRFAPQLSAPFESFQKIGKQTGIVYYVLANNTSKVCPSCQWIKNFYLKYEKKNTIFNLQKNQKLKVFFEQEKNRFRFEYQMSKEYISVYSDVDRQRYDKTKNQNKGGYLEYKNSNQKEIIDKDGVIQKQSITLQLKELFKENHIDLEKEILKQLDNKKEKNSGYTGVYNKFIYLFNLILQIRNAISFREKDYIQCPSCHFDTRKENYLKINDGDGNGAYNIALRGLYLLKGKNGIINNLEKIKLIFSNNDYFQWAKKLKNKK

SEQ ID NO: 15 - protein, 1285 aa, Unknown
  Description of Unknown: Cas12 sequence
MEEKMLKSYDYFTKLYSLQKTLRFELKPIGKTLEHIKNSGIIESDETLEEQYAIVKNIIDKLHRKHIDEALSLVDFTKHLDTLKTFQELYLKRGKTDKEKEELEKLSADLRKLIVSYLKGNVKEKTQHNLNPIKERFEILFGKELFTNEEFFLLAENEKEKKAIQAFKGFTTYFKGFQENRKNMYSEEGNSTSIAYRIINENLPLFIENIARFQKVMSTIEKTTIKKLEQNLKTELKKHNLPGIFTIEYFNNVLTQEGISRYNTIIGGKTTHEGVKIQGLNEIINLYNQQSKDVKLPILKPLHKQILSEEYSTSFKIKAFENDNEVLKAIDTFWNEHIEKSIHPVTGNKFNILSKIENLCDQLQKYKDKDLEKLFIERKNLSTVSHQVYGQWNIIRDALRMHLEMNNKNIKEKDIDKYLDNDAFSWKEIKDSIKIYKEHVEDAKELNENGIIKYFSAMSINEEDDEKEYSISLIKNINEKYNNVKSILQEDRTGKSDLHQDKEKVGIIKEFLDSLKQLQWFLRLLYVTVPLDEKDYEFYNELEVYYEALLPLNSLYNKVRNYMTRKPYSVEKFKLNFNSPTLLDGWDKNKETANLSIILRKNGKYYLGIMNKENNTIFEYYPGTKSNDYYEKMIYKLLPGPNKMLPKVFFSKKGLEYYNPPKEILNIYEKGEFKKDKSGNFKKESLHTLIDFYKEAIAKNEDWEVFNFKFKNTKEYEDISQFYRDVEEQGYLITFEKVDANYVDKLVKEGKLYLFQIYNKDFSENKKSKGNPNLHTIYWKGLYDSENLKNVVYKLNGEAEVFYRKKSIDYPEEIYNHGHHKEELLGKFNYPIIKDRRYTQDKFLFHVPITMNFISKEEKRVNQLACEYLSATKEDVHIIGIDRGERHLLYLSLIDKEGNIKKQLSLNTIKNENYDKEIDYRVKLDEKEKKRDEARKNWDVIENIKELKEGYMSQVIHIIAKMMVEEKAILIMEDLNIGFKRGRFKVEKQVYQKFEKMLIDKLNYLVFKNKNPLEPGGSLNAYQLTSKFDSFKKLGKQSGFIFYVPSAYTSKIDPTTGFYNFIQVDVPNLEKGKEFFSKFEKIIYNTKEDYFEFHCKYGKFVSEPKNKDNDRKTKESLTYYNAIKDTVWVVCSTNHERYKIVRNKAGYYESHPVDVTKNLKDIFSQANINYNEGKDIKPIIIESNNAKLLKSIAEQLKLILAMRYNNGKHGDDEKDYILSPVKNKQGKFFCTLDGNQTLPINADANGAYNIALKGLLLIEKIKKQQGKIKDLYISNLEWFMFMMSR

SEQ ID NO: 16 - protein, 1238 aa, Unknown
  Description of Unknown: Cas12 sequence
MNNYDEFTKLYPIQKTIRFELKPQGRTMEHLETFNFFEEDRDRAEKYKILKEAIDEYHKKFIDEHLTNMSLDWNSLKQISEKYYKSREEKDKKVFLSEQKRMRQEIVSEFKKDDRFKDLFSKKLFSELLKEEIYKKGNHQEIDALKSFDKFSGYFIGLHENRKNMYSDGDEITAISNRIVNENFPKFLDNLQKYQEARKKYPEWIIKAESALVAHNIKMDEVFSLEYFNKVLNQEGIQRYNLALGGYVTKSGEKMMGLNDALNLAHQSEKSSKGRIHMTPLFKQILSEKESFSYIPDVFTEDSQLLPSIGGFFAQIENDKDGNIFDRALELISSYAEYDTERIYIRQADINRVSNVIFGEWGTLGGLMREYKADSINDINLERTCKKVDKWLDSKEFALSDVLEAIKRTGNNDAFNEYISKMRTAREKIDAARKEMKFISEKISGDEESIHIIKTLLDSVQQFLHFFNLFKARQDIPLDGAFYAEFDEVHSKLFAIVPLYNKVRNYLTKNNLNTKKIKLNFKNPTLANGWDQNKVYDYASLIFLRDGNYYLGIINPKRKKNIKFEQGSGNGPFYRKMVYKQIPGPNKNLPRVFLTSTKGKKEYKPSKEIIEGYEADKHIRGDKFDLDFCHKLIDFFKESIEKHKDWSKFNFYFSPTESYGDISEFYLDVEKQGYRMHFENISAETIDEYVEKGDLFLFQIYNKDFVKAATGKKDMHTIYWNAAFSPENLQDVVVKLNGEAELFYRDKSDIKEIVHREGEILVNRTYNGRTPVPDKIHKKLTDYHNGRTKDLGEAKEYLDKVRYFKAHYDITKDRRYLNDKIYFHVPLTLNFKANGKKNLNKMVIEKFLSDEKAHIIGIDRGERNLLYYSIIDRSGKIIDQQSLNVIDGFDYREKLNQREIEMKDARQSWNAIGKIKDLKEGYLSKAVHEITKMAIQYNAIVVMEELNYGFKRGRFKVEKQIYQKFENMLIDKMNYLVFKDAPDESPGGVLNAYQLTNPLESFAKLGKQTGILFYVPAAYTSKIDPTTGFVNLFNTSSKTNAQERKEFLQKFESISYSAKDGGIFAFAFDYRKFGTSKTDHKNVWTAYTNGERMRYIKEKKRNELFDPSKEIKEALTSSGIKYDGGQNILPDILRSNNNGLIYTMYSSFIAAIQMRVYDGKEDYIISPIKNSKGEFFRTDPKRRELPIDADANGAYNIALRGELTMRAIAEKFDPDSEKMAKLELKHKDWFEFMQTRGD

SEQ ID NO: 17 - protein, 1347 aa, Unknown
  Description of Unknown: Cas12 sequence
MASSHFISLDNSFSKFTNLYSLSKTLRFELVPTENTTVMLENNNVFKKDQIIQVKYEKTKPFIDRLHREFIKEALSNYAVSGLQEYFEILRAGGKKANLDSAKKQLRKHVVDQFNATASLWVSRHKDVGFKGEGIELLFKEAVFKLLKEKYGTDMNALIEDNHGKQISIFDSWKGFTGYFDKFQQTRRNLYKDDGKEGRVATRIIDQNLTRFCDNIFVYEKIKDKVSFIDVEKSFGKTCSEVFIPDYYNTCLLQDGIDSYNEFIGGKPLENGEKVQGLNELINLYRQTTGDKVPYFKKLEKQILGEKDEVFIDEITDEDFVPRVLAFYRTVDAKYKLFLKLLDDFVTNQDVYELSQIYISKKGLQEKLYRWLTPSAREVYDEELFEVLKKAKKVNNKDKQKVSGYVPDFVEVLYIKQALENIDAKLIWSDRYYSDGENEGIIDKGFSSWKQFLVILNHEYRQLLSFEDHVIIDKELDFDKEVKQLTDTVEIVSQDKNARTVTYRGGYDVYKAKLAELGQSFEKDTCTKKVIKNFADSVLSMYHFAMMFAVWDDTYPLDVFYTNNEFGYLLYYEDAYKNIVQEYNKLRNYLTKKPYSTEKWKLNFENPTLAAGFDKNKESDNSTVILRQGDKYFLGVMKKGFNKIFDNSQISQTGNSPEAYFEKMVYKYTKDVVTGIPKSSTQVKEVQEHFRNSDEDFFLEECSSVGNFIVPLKITKEIFDLNNKVYAKEDISQAMYRWALNTDEEKNYVKSFQKSYLSLGGSPELYCKSVTLWIGFCLNFLKSYPSAAYFDYSQLRQASDYESVDECYQELNNAGYTILFQNVSEKYVRVKNKNGELYLFQIKNKDWNEGSTGKKNLHTLYFESLFSKENAKQGFPFKLSGNAELFFRPGSIEQTYERRNFPREIPLKRRYSKDGIFFHIPVQVNRTKVGSPNQFNKEVNDFLAGNPNINIIGVDRGEKHLVYYSVISQNGEKIDGGSFNEINGQDYHDKLEKRAKEREQQRRDWETVEGIKDLKKGYISQVVKKLADLAIEHNAIIVMEDLNMRFKQIRGGIEKSVYQQLEKALIDKLSFLVNKGEVDPQKAGHLLKAYQLTAPIDAFKDMGKQTGIMFYTQAAYTSKIDPVTGWRPHLYLKYSSVEKAKDDISRFTKIAYKNDRFEFTYNITDFRTQKEWPLKTEWTVCSCVERFRWNKKLANGKGDYEHYPNVTDDFKKLFDSVGINYLQENIKSQVVNLDENTNVEFFREFIKLFALVCQIRNTNSEEAGNLNDFILSPVEPFFDSRSAEDFGKGLPSNGDENGAYNIARKGMIILNTLSTFKNDHGSCEGLSWGDLYISDTQWDDFAQSFHG

SEQ ID NO: 18 - protein, 1227 aa, Unknown
  Description of Unknown: Cas12 sequence
MDAKEFTGQYPLSKTLRFELRPIGRTWDNLEASGYLAEDRHRAECYPRAKELLDDNHRAFLNRVLPQIDMDWHPIAEAFCKVHKNPGNKELAQDYNLQLSKRRKEISAYLQDADGYKGLFAKPALDEAMKIAKENGNESDIEVLEAFNGFSVYFTGYHESRENIYSDEDMVSVAYRITEDNFPRFVSNALIFDKLNESHPDIISEVSGNLGVDDIGKYFDVSNYNNFLSQAGIDDYNHIIGGHTTEDGLIQAFNVVLNLRHQKDPGFEKIQFKQLYKQILSVRTSKSYIPKQFDNSKEMVDCICDYVSKIEKSETVERALKLVRNISSFDLRGIFVNKKNLRILSNKLIGDWDAIETALMHSSSSENDKKSVYDSAEAFTLDDIFSSVKKFSDASAEDIGNRAEDICRVISETAPFINDLRAVDLDSLNDDGYEAAVSKIRESLEPYMDLFHELEIFSVGDEFPKCAAFYSELEEVSEQLIEIIPLFNKARSFCTRKRYSTDKIKVNLKFPTLADGWDLNKERDNKAAILRKDGKYYLAILDMKKDLSSIRTSDEDESSFEKMEYKLLPSPVKMLPKIFVKSKAAKEKYGLTDRMLECYDKGMHKSGSAFDLGFCHELIDYYKRCIAEYPGWDVFDFKFRETSDYGSMKEFNEDVAGAGYYMSLRKIPCSEVYRLLDEKSIYLFQIYNKDYSENAHGNKNMHTMYWEGLFSPQNLESPVFKLSGGAELFFRKSSIPNDAKTVHPKGSVLVPRNDVNGRRIPDSIYRELTRYFNRGDCRISDEAKSYLDKVKTKKADHDIVKDRRFTVDKMMFHVPIAMNFKAISKPNLNKKVIDGIIDDQDLKIIGIDRGERNLIYVTMVDRKGNILYQDSLNILNGYDYRKALDVREYDNKEARRNWTKVEGIRKMKEGYLSLAVSKLADMIIENNAIIVMEDLNHGFKAGRSKIEKQVYQKFESMLINKLGYMVLKDKSIDQSGGALHGYQLANHVTTLASVGKQCGVIFYIPAAFTSKIDPTTGFADLFALSNVKNVASMREFFSKMKSVIYDKAEGKFAFTFDYLDYNVKSECGRTLWTVYTVGERFTYSRVNREYVRKVPTDIIYDALQKAGISVEGDLRDRIAESDGDTLKSIFYAFKYALDMRVENREEDYIQSPVKNASGEFFCSKNAGKSLPQDSDANGAYNIALKGILQLRMLSEQYDPNAESIRLPLITNKAWLTFMQSGMKTWKN

SEQ ID NO: 19 - protein, 1331 aa, Unknown
  Description of Unknown: Cas12 sequence
MVNKQNERGDFDDLTNLYEISKTLRFELVPVGETDRMLKEENVFKVDENIKRKYQQTKLFFDRIHREFAKEALSVEGILSELEEYLAIFIEWRKDKKIHEKTLNQKEKELRKQVVSAFNAMANKWIERYGDVNLKKKNVEFLFEEGIFRVLKERYGEEDGSTITASDTGEVFSIFDSWKGFTGYFAKFFETRKNFYKDDGTATAIATRIVDENLRRFCDNLIVAQRLTENIDFSEVENNFQIKIKEVLFMEFYNKCLLQDDIDFYNKVIGGETLKTGEKLKGINELVNLHRHKTGEKLPFLKTLDKQILGRKEQFLDEIESEEELLEKLKDFQNVATKKIKVIKSLFGDFVENNENYDLEKIYISKKAFNTISRKWTGETEQFEKLLFESMKSDKPAGLKYDKKENNYKFPDFIAVSYIKDALENFSGEQKFWKDRYYIELELDNQVVWKQFLDIFYWEFSSLFKRSFVNKETGEISEVGCDIFEKKFINLIDDFEYNQKSKILIKDFADSVLSVYQMANYFSLEKKRKWSTEFETDSKFYDDSEIGFRNCFYEDVFEGIVQVYNKLRNYLTKKPFSEEKWKLNFENPTLAAGWDKNKEKDNSTVILRKDEKYFLAIMKKGNNVIFDDRNKALFSQNLEHGKYEKVVYKFAKDVTLGIPKSTTQTKSVIAHFKNSDEDYQITNGSAVGDFLEPLVVTKRIFELNNKIYSKNNLGKVLYRSEVSKDKQKEYIKLFQKKYLVLGGNKNLYRDAVKEWIDFCKSFIKVYPSYKYFDFSLLKEAVEYNSVDEFYKELNSYGYAISFQDISCDYIEEKNKNGELYLFQIKNKDWNKGSTGMKNLHTLYFESLFSEENIKNNFVTKLNGGAEIFYRPKTSKEKLGRKKIVRNGQEVFVVNHKRYSEDKIFFHCSIALNRGKGKLLKFNARINDLLANNPDINVIGVDRGEKHLAYYSIIDQKCKILDSGTLNEVGAKVDYHEKLSNRAKKREDGRRDWGWGQIEDIKNLKKGYVSQVVHKLAELIIKYNAILVFEDLNMRFKQIRGGIEKSIYQQLEKALIDKLNFLVKKGEKDSKSAGHLLKAYQLAAPFETFDKMGKQTGVIFYTQASYTSKIDPITGWRPNLYLKHSNANDSQKKIAKFSRIEFINDRFEFEYDLKKFIEMKEVPENTKWTLCSCVQRYRWNRKLNANKGGYDSYNDLTKNFKALFESVGIDIKKNIKEQIVKMEIKGNEKFFKSFIFYWQLLCQIRNTDELKKGDDNDFILSPVEPFFDSRKKNGDDLPKNGDDNGAYNIARKGVIVLNKISEFSKQNGNCEKCGWKELYVSAKDWDDFVQAK

SEQ ID NO: 20 - protein, 1275 aa, Unknown
  Description of Unknown: Cas12 sequence
MQNKQSFADFTNLYSLSKTLRFELKPIGQTQAMLDENKIFEVDENRKKAYDKTKPYFDRLHREFINESLSNAQLKGISEYFETFKQFRSNQNNKDLKELINKQQKFLRHQIVTLFDENGKHWATTKYAHLKIKKKNLDILFDEQVFYILKERYGSEKETQLVDKETGAVTSIFDNWKGFTGYFTKFFETRKNFYKSDGTSTALATRIIDQNLNRFFDNLETFHKIKDKIDVKEVEIFFKLKADNVFSIDFYNQCLLQNGIDKYNDFLGGQTLENGEKQKGINEIINKYRQDNKDQKLPFLKKLDKQILSEKDRFINEIESKEEFFQVLTEFYQSATVKVTIIKTLLNDFVHNTDKYKLEKIYLTKEAFNTIANKWTDETQIFEDNLDLVLKNKKITAKQDFIPLAYIKEALEVIEKDRKFFKDRYYNDPQIGFFPDQSYWEQFLAILNFEFMTHFQRVAKDKITGKKIELGYFVFEKRIKELLDSDPSLNSQSKIIIKEFADEVLHIFQMAKYFALEKKREWKGDYYQLDDQFYNHIDYGFKDQFYENAYEKIVQPYNKIRNYLTKKPYSDVKWKLNFGNPTLANGWDKNKEADNTAVILKKDGNYYLGVMKKGKNKIFSDQNKEKYKAYNSAYYEKLVYKLFPDPSKMFPKVCFSKKGLNFFQPSEEILRIYKNNEFKKGNTFSISSMQKLIAFYIDCLGLYEGWKHYEFKNIKDVRQYKENIGEFYADVAESGYKLWFEKISEEYITQKNQLGELFLFQIYNKDFAKKTTGRKNLHTIYFEELFSQTNIDNNFPFKLNGQAELFYRPKSLEKIEEKRNFKRSIVNKKRYTQNKIFFHVPITLNRTSENIGRFNVRVNNFLANNSNVNIVGVDRGEKNLAYYSIIKQNGEVLKSGSLNIINGVDYHALLTDRAQRREQERRNWQDVESIKDLKRGYISQVVHELVSLAIKYNAIIVMEDLNMRFKQIRGGIEKSTYQQLEKALIEKLNFLVNKEETDSNQAGNLLNAYQLTAPFKTFKDMGKQTGIIFYTQASYTSKIDPLTGWRPNIYLRYSNAKQAKADILMFTNIYFSEKKDRFEFTYDLEKIDDKRKDLPIKTEWTVCSNVERFSWEKSLNNNKGGYVHYPIQDSNGEESITSKLKKLFMDFGIDLTDIKTQIESLDTNKKDNANFFRKFIFYFQLICQIRNTQVNKSDDGNDFIFSPVEPFFDSRFADKFRKNLPKNGDENGAYNIARKGLIILHKISDYFVKEGSTDKISWKDLSISQTEWDNFTTDK

SEQ ID NO: 21 - protein, 1313 aa, Unknown
  Description of Unknown: Cas12 sequence
MDKQKNKLQNFTNLYELSKTLRFELKPVGETQHLLEENKVFGIDGNIKKKYEATKPFFDRLHRKFVKEALVNIALGGLDNYLEVYKKFTNDRKDKENQKELEKQEKLLRKQIKIFFDSQANQWKEKYNKINFKKSGLNILFEESIFQLLKEIYGKEDDAFLKNDDNEFIFDKDGNKISIFDSWKGFTGYFKKFFETRKNFYKDDGTSTAIATRIIDQNLRRFCDNIFIYNKIKNKLDFSSLEKEQDVVLEEIFTTAYYMDCILQDDIDLYNGVLGGETLDDGTKIKGLNEIINKYRQDNKGDKIPFFKKLDKQILSEKDRKFLDEIESEEELAELLKIFINNTEAKVKVFDELVNQLCVNDSDFELDKIYISKEAFNTISHKWTNQTHEFERVLFEEMKPDKITGLDYKKAEDKYKFPDFIALKYIIKSLNTLDKDSEFWKSHYYKTEENQNAILSLEEKVGEQFLQIYKYELQRLHSRNVNVENKDGKMKEKEIGLDYSLTTVKELLKNFKLTDKSKIIIKDFADNVLQYYQLAKYFSVEKNREWNYTKLELADFYINPDFGYEIFYGNAYEEIIQIYNKLRNYLTKKPFSEEKWKLNFENPTLAGGWDKNKERGNATVILRKNEKYYLGIMAKGYNDIFTDKNKDKFDGEGYEKMVYKLFPGPNKMMPKVCFSKKGLDFFEPSEKIIDIYKDGKFKQGDTFSIDSMQQLIDFYKRALREYNGWKMYDFSKLKDTNDYTTNIGEFYNDVACAGYKVWFDNISEEYIQEKNENGELYLFEIHNKDWNLKDEKKKTGTKNLHTLYFESLFSDENALRDFVMKLSGEAELFFRPKTNADKLGYRKDKKGNKVVKNKRYSEDKMFLHLSINLNRGKGQAFWFNRNINNFLANNSDINVIGIDRGEKHLAYYSVISQQGEILDNGSLNEIAGVDYYAKLSKRAKEREGQRKDWQAVSDIKNLKKGYISQVVRKLADLAIEHNAIIVLEDLNMRFKQIRGGIEKSIYQQLEKALIEKLNFLVNKKEIDSDKAGNLLRAYQLTAPFETFQKMGKQTGIIFYTQASYTSKIDPLTGWRPNLYLKKGNAKINKEQIEKFSKIEFTNNRFEITYDLKNFGDKKKKYPQKTKWTLCSSVERWRWDRKLNNNKGGYIHYEDLTTEFKSLFEKFEIDIEGDILEQIKTIDENDRNNARLFSGFIYLWGLLSQIRNTDGELDEKIKKLEREDKNEEISEKEKFDVDFILSPVEPFFDSRTPEKFGENLPKNGDDNGAYNIARKGIITLERIKKFYELSDKEREKLKYPDLFITNAEWDDFATKRDS

SEQ ID NO: 22 - protein, 1155 aa, Unknown
  Description of Unknown: Cas13 sequence
MDNNTTLEKTELGLGITYNHDKVEDKHYFGGFFNLAQNNIDLVAQEFKKRLLVQGKDSINIFSNYFSDQCSITNLERGIKVLSEYFPVIFYFDLDENNKSKSIRQHIILLLDTINNLRNYYTHYYHKKVIIDDALYPLLDTILLKVVLEIKKKKLKEDKTKQLLKKGLEKEMAILFNLMKKEQKEKKIKGWNIDKNIKGAVLNRAFSHLLYNDGISDYRKSKSNTEDENLKDTLSESGILFLLSFFLNKKEQEQLKANIKGYKGKIASIPDEEITLKNNSLRNMATHWTYSHLTYKGLKHRIKTDHEKETLLVNMVDYLSKVPNEIYQNLSEQNKSLFLEDINEYMRDNEENNDSSEASRVIHPVIRKRYENKFAYFAIRFLDEFAEFPTLRFMVNVGNYIHDNRKKDIGGTSLITNRTIKQQINVFGNLTEIHKKKNDYFEKEENKEKILEWELFPNPSYHFQKENIPIFIDLEKSKETNELAKEYAKEKKKIFGSSRKKQQNTAKKNREAIINLVFDKYKTSDRKTVTFEQPTALLSFNELNAFLYAFLVENKTGKELEKIIIEKIANQYQILKNCSSTVDKTNDSIPKSIKKIAHPTTDSFYSEGKKIDIEKLERDIKIEIEKTNEKLETIKENETSAKNYKRNERDIQKRKLYRKYVFFTNEIGIEATWITNDILRFLDNKENWKGYQHSELQKFISQYDNYKKEALGLLESEWNLESEAFFGQKLKRIFQSNFTFETFYKKYLDNRKDTLETYLSAIENLKTMTDVPPKILKKSWAELFRFFDKKIYLLSTIETKINELITKPINLSRGVFDEKPTFINGKSPNKENDQHLFANWFIHAKEQTIFQDFYNLALETPKEINNLKKQNYKLERSINNLKIEDIYIKQMVDFLYQKLFEQSFKGSLQDLYTSKEKREVEKSKAKNEQTPDESFIWKKQVEINALNGRIIAKTKIKDIGKFKNLLTDNKITHLISYDNRIWNFSLDNDGDTTKKLYSLNTELESYERIRREKLLKQIQEFEQFLLKQETEYSAERKHPEKFEKDGNPNFKKYIIEGMLNKITPVNEIEELEILKSKEDVFKIDFNEIVKLNNESIKKGYLLIMIRNKFAHNQLIDKNLFTFSLQLYSKNENENFSEYLDKVCQKIIQEFIEKLK

SEQ ID NO: 23 - protein, 1134 aa, Unknown
  Description of Unknown: Cas13 sequence
MNETDYLAKRLEYNYASIEDKHYFGGYFNLAQNNINDLSKAFKEKFGMKPKSCILDFFTQDKAIAEYQLGVEFLQKNLPVIRYLYLPTSHKRFENVPKNQLISEQRNYFKNSLKVLKNLIRDYRNFYTHHFHKPIPVFPETYKLLDDLFLAVANDVKKHRMKTDASKQLLKKGLIEELAQLEKLKLEDLKKLKREGKKVNLNDKEAITNAILNDSFSHLLPKENTISKYYSAVPTEDIDTENGVTISESGIIFLLGLFLTKKQSEDLRSRVKGFKAKLIVNPENPINKKNNSLKYMATHWVFGYLGFKGLKNRFTTTFTKDTLLAQIVDELSKVPDELYQVLPEELKNEFLEDMNEYLKEENSESLDKATVIHPVIRKRYENKFAYFALRFLDEFVDFPTLRFQLHLGNYVHDKREKPIEGTKYVTERIVKEKIKAFAKLSEAAQLKQKYFEEKENHQSIGLQLYPNPSYNFVGNNIPIHLNLNEHFFPKEVKIVAGRLKKRNSSYKSDHPEEYKVRTDNKIKPDAILQDLGKPEKLAPVAMLSLNELPALLHLVLTKKTPEEIEIIIAQKIAERYNVLTNYKAGDDISKGQITKNLLKAKQKKEVNLDKLQLAIEKEIAVTNDKLQTIALHIKERNDPKQKRKYVFTNKEIGLQVTWLANDLKRFMPKGSRQNWRGQHHSQLQKSLAFYDIQPKEPLSLLEEVWDFKNEAYLWNNGIRRSFDKRDFISFYTSYLNNRKETFQRFKDQLNGIRSNKKILDKFIKQQHLWNLFHKRLYVIDTIEEQVEKLLVKPMQFPKGVFDHKPTYIKGKSIQENPECFADWYVAWNQHTDYQKFYSWDRDYKSAYLSGEQEKTEKRFIRVQGSKINKVKQQDVLLAKMASIIFNELYLPEDAEHLDLNLSDIYKTQTERKAEIEAALIQSHKTTGDNSANIIKSTSAWTLTVPYCSKNIYEPQVKLKELGKFKKFIASQKVQTLFEYKPQKIWNKTELEEVLELKANSYEVIRRDYLLKSIQEFEKYMIKKLPTLIDTNEHPNFNKYLTTFLKSLELVSEEDAKWLISKKDFDTTPIDELKKQSKIMEKAFLLVMIRNKFSHNQLPRKIYYDEIYKNVPNAVSINFNELFLEYTNQTILEFK

SEQ ID NO: 24 - protein, 1145 aa, Unknown
  Description of Unknown: Cas13 sequence
MESIIGLGLSFNPYKTADKHYFGSFLNLVENNLNAVFAEFKERISYKAKDENISSLIEKHFIDNMSIVDYEKKISILNGYLPIIDFLDDELENNLNTRVKNFKKNFIILAEAIEKLRDYYTHFYHDPITFEDNKEPLLELLDEVLLKTILDVKKKYLKTDKTKEILKDSLREEMDLLVIRKTDELREKKKTNPKIQHTDSSQIKNSIFNDAFQGLLYEDKGNNKKTQVSHRAKTRLNPKDIHKQEERDFEIPLSTSGLVFLMSLFLSKKEIEDFKSNIKGFKGKVVKDENHNSLKYMATHRVYSILAFKGLKYRIKTDTFSKETLMMQMIDELSKVPDCVYQNLSETKQKDFIEDWNEYFKDNEENTENLENSRVVHPVIRKRYEDKFNYFAIRFLDEFANFKTLKFQVFMGYYIHDQRTKTIGTTNITTERTVKEKINVFGKLSKMDNLKKHFFSQLSDDENTDWEFFPNPSYNFLTQADNSPANNIPIYLELKNQQIIKEKDAIKAEVNQTQNRNPNKPSKRDLLNKILKTYEDFHQGDPTAILSLNEIPALLHLFLVKPNNKTGQQIENIIRIKIEKQFKAINHPSKNNKGIPKSLFADTNVRVNAIKLKKDLEAELDMLNKKHIAFKENQKASSNYDKLLKEHQFTPKNKRPELRKYVFYKSEKGEEATWLANDIKRFMPKDFKTKWKGCQHSELQRKLAFYDRHTKQDIKELLSGCEFDHSLLDINAYFQKDNFEDFFSKYLENRIETLEGVLKKLHDFKNEPTPLKGVFKNCFKFLKRQNYVTESPEIIKKRILAKPTFLPRGVFDERPTMKKGKNPLKDKNEFAEWFVEYLENKDYQKFYNAEEYRMRDADFKKNAVIKKQKLKDFYTLQMVNYLLKEVFGKDEMNLQLSELFQTRQERLKLQGIAKKQMNKETGDSSENTRNQTYIWNKDVPVSFFNGKVTIDKVKLKNIGKYKRYERDERVKTFIGYEVDEKWMMYLPHNWKDRYSVKPINVIDLQIQEYEEIRSHELLKEIQNLEQYIYDHTTDKNILLQDGNPNFKMYVLNGLLIGIKQVNIPDFIVLKQNTNFDKIDFTGIASCSELEKKTIILIAIRNKFAHNQLPNKMIYDLANEFLKIEKNETYANYYLKVLKKMISDLA

SEQ ID NO: 25 - protein, 1147 aa, Unknown
  Description of Unknown: Cas13 sequence
MEDKTTGAGISYDHTLMEDKHFFGGFLNLAQNNIDALLKAFKERFNVRYQSKQFAEVCFSDKLPDQDYLDRTLFLETHLPFIKYIGGKEANNRGTFRKNITLFFESIEQLRNFYTHYYHKPILFPEELYENLDRIFVEVSKEVKTHKVKNDQTRHLLTKNLANELDIRYKKNVEKLKELKAQGKKVNIHDKEAIKNSVLNNAFNHLIYKKEEDVFATEAYKSKYNLEDPSKNGISLSQSGLLFLLSMFLNKKDIEALKSRVKGFKAKIIRDGEENISGLKFMATHWVFSSLSFKNVKHKLSTDFHKETLLIQIVDELSKVPDEVYKTFDKQTQEEFIEDINEYMKVGNKDLSLEESTVIHPVIRKRYDNKFNYFALRFLDEFAGFPTLRFQVHIGNYIHDRRIKNIDGTAFQTERSVKERIKVFGKLSQMSNLKAEYVSGLMDEPVDTGWEIFPNPSYNIIENNIPIYIEMGDHFNDEVLQSKMARKKQKPEELKDRNSAKASKESMIQTLQNDKGLMDVITVSPTAQLSLNELPAILYELLVKKTPAKTIEKKLVGKLNQRLKEIKNYNPEKPLPASQISKRLRLNREEGSINTKKIIALLQKELNYTQEKLDLLEKNRKEYGKKVDGKILRKYVFGLKEIGNLATDMAMDIKRFMPANVRKEWKGYQHSQLQQSLAFYDKRPEEAFNILQEVWDINREKSLWDTWILNAFQTSGNFERFFELYHEGRKKYIQQQLENIDRYTDNKKFLQKFINQQFPTNFLEKRLYTLESLEIEKLKILSKPFILPRGTFDEKPTFIMGEKVTENPELFADWYTYGYQQHEFQKFYSWPRDYKDLLQNEQKRDPDFAENKKGLSDLKQLELLQLKQDIIIKKIKTQDLYLKLIMDALFIEVFGQEADISLNDLYLTQEERLEKEKLALKQHQRVEGDDSPNVIKDNFIWSKTMPYKHDKIYEPQVRLKDFGKFKHFLLDDKVAKILSYDLQETWNKNELEIQINTGQDSYEVIRREELLKEIQLLEKQILETFSHTLDEHPKEFEDEKGNPNFKMYMANGVIRKGSSTTAKDEADWLEHEKDFDNLSLEIFNSKSEITQLTFLIVLIRNKFGHNQLPIKQFYEIIQNEYSITGETISRLYLNFIIYAKARLKDLM

SEQ ID NO: 26 - protein, 1133 aa, Unknown
  Description of Unknown: Cas13 sequence
MEEKLGKGVEYNPFKKEDKYYFGGYFNLAENNINEVFKEVKKRLGETNSSSNIELLNNVFRKEMSLVDYEKWVNAFADYFPIVNYLDRETIKKGEKVVEVPREKRIECFRDMFKGLINTISQLRHYYTHYHHEPIEIDDKILSFLDEVLFNTIITTKNKYLKTDKTKELIKDSLQEELDILCKLKVKYLESKRKRFDRKDKGAIENAVYNDVFRRFIYKDEKGNESLKDIIRTKQIKVHQNSSYLELPISSSGIIFLLSLFLNKKEVESLKSNIRGYKGKSKSEETTPEKNGLLFMTTHRIYSVLAYKGLKKRIKTSVKGDKETLLMQMIDEVSKVPHCIYQNLDQTLQATFIEDWNEYFKDNEENEENLENSRVLHPVIRKRYEDKFNYFAIRFLDEYAEFPSLRFQVNLGNYVHHKATKKFGNSEVTTERVIKDKITVFGRLSEVNKAKADFFKNETELDPAWELFPNPSYEFPKEKGNNDKDAGKIGIQVKLLNKDIEAVLNESKNTLNNKTRKSDKISKKEIINKIVQINDDTKYNNKNIIYQGNAIAYLSLNDIHSLLYELLVIGTKGDKLERKVVEKIQQQVTEIRNKDTSAKILSKYKDSEESNTIDKKKLVIDLKYEYDKLQDLLKEHKNREEDYIQTKKKKKDSPKRKYILYHNEKGQVAVWLSNDIKRFMPQNFKEKWKGYQHSEFQKSLAYYETNKEMLKIILQDLDLEQFPFDIKSCFYKNTLEDFYNRYLSLRISYLENVIDRVECFSNEPKAFKSVLKECFVFLKKQNYTNHSLDEQVKKILANPIFIERGFLDTKPTMIQGVKFSENKGCFADWFVHYKEYEHYQKFYDTNLYPVESIEDKERQKLEATIKKQQKNDVFTLLMIKKIFNDLFNQDFEANLYEMYQSKEEREKNQLVAKETQNRNLNFIWNKPIAIDLFDGKVKIDEVKLKDVGSFRKYENDKRVQTFITYIPEIQWIPYLPNTWEGINLPVNVIERQIDRYEKVRSEELLKEVQAIEKYIYEQVNDKTELLQNGNQNFKNYLVNGLLKQIQGIDVSNFKFINQQKFETINVKDLDNEASALEQKVYVLINIRNQFSHNQFPKSAFYQFCQKILSIEEDELFADYYLRLFKLLRNELLD

SEQ ID NO: 27 - protein, 1156 aa, Unknown
  Description of Unknown: Cas13 sequence
MNTRVTGMGVSYDHTKKEDKHFFGGFLNLAQDNITAVIKAFCIKFDKNPMSSVQFAESCFTDKDSDTDFQNKVRYVRTHLPVIGYLNYGGDRNTFRQKLSTLLKAVDSLRNFYTHYYHSPLALSTELFELLDTVFASVAVEVKQHKMKDDKTRQLLSKSLAEELDIRYKQQLERLKELKEQGKNIDLRDEAGIRNGVLNAAFNHLIYKEGEIAKPTLSYSSFYYGADSAENGITISQSGLLFLLSMFLGKKEIEDLKSRIRGFKAKIVRDGEENISGLKFMATHWIFSYLSFKGMKQRLSTDFHEETLLIQIIDELSKVPDEVYHDFDTATREKFVEDINEYIREGNEDFSLGDSTIIHPVIRKRYENKFNYFAVRFLDEFIKFPSLRFQVHLGNFVHDRRIKDIHGTGFQTERVVKDRIKVFGKLSEISSLKTEYIEKELDLDSDTGWEIFPNPSYVFIDNNIPIYISTNKTFKNGSSEFIKLRRKEKPEEMKMRGEDKKEKRDIASMIGNAGSLNSKTPLAMLSLNEMPALLYEILVKKTTPEEIELIIKEKLDSHFENIKNYDPEKPLPASQISKRLRNNTTDKGKKVINPEKLIHLINKEIDATEAKFALLAKNRKELKEKFRGKPLRQTIFSNMELGREATWLADDIKRFMPDILRKNWKGYQHNQLQQSLAFFNSRPKEAFTILQDGWDFADGSSFWNGWIINSFVKNRSFEYFYEAYFEGRKEYFSSLAENIKQHTSNHRNLRRFIDQQMPKGLFENRHYLLENLETEKNKILSKPLVFPRGLFDTKPTFIKGIKVDEQPELFAEWYQYGYSTEHVFQNFYGWERDYNDLLESELEKDNDFSKNSIHYSRTSQLELIKLKQDLKIKKIKIQDLFLKLIAGHIFENIFKYPASFSLDELYLTQEERLNKEQEALIQSQRKEGDHSDNIIKDNFIGSKTVTYESKQISEPNVKLKDIGKFNRFLLDDKVKTLLSYNEDKVWNKNDLDLELSIGENSYEVIRREKLFKKIQNFELQTLTDWPWNGTDHPEEFGTTDNKGVNHPNFKMYVVNGILRKHTDWFKEGEDNWLENLNETHFKNLSFQELETKSKSIQTAFLIIMIRNQFAHNQLPAVQFFEFIQKKYPEIQGSTTSELYLNFINLAVVELLELLEK

SEQ ID NO: 28 - protein, 1036 aa, Unknown
  Description of Unknown: Cas13 sequence
METQILGNGISYDHTKTEDKHFFGGFLNTAQNNIDLLIKAYISKFESSPRKLNSVQFPDVCFKKNDSDADFQHKLQFIRKHLPVIQYLKYGGNREVLKEKFRLLLQAVDSLRNFYTHFYHKPIQLPNELLTLLDTIFGEIGNEVRQNKMKDDKTRHLLKKNLSEELDFRYQEQLERLRKLKSEGKKVDLRDTEAIRNGVLNAAFNHLIFKDAEDFKPTVSYSSYYYDSDTAENGISISQSGLLFLLSMFLGRREMEDLKSRVRGFKARIIKHEEQHVSGLKFMATHWVFSEFCFKGIKTRLNADYHEETLLIQLIDELSKVPDELYRSFDVATRERFIEDINEYIRDGKEDKSLIESKIVHPVIRKRYESKFNYFAIRFLDEFVNFPTLRFQVHAGNYVHDRRIKSIEGTGFKTERLVKDRIKVFGKLSTISSLKAEYLAKAVNITDDTGWELLPHPSYVFIDNNIPIHLTVDPSFKNGVKEYQEKRKLQKPEEMKNRQGGDKMHKPAISSKIGKSKDINPESPVALLSMNEIPALLYEILVKKASPEEVEAKIRQKLTAVFERIRDYDPKVPLPASQVSKRLRNNTDTLSYNKEKLVELANKEVEQTERKLALITKNRRECREKVKGKFKRQKVFKNAELGTEATWLANDIKRFMPEEQKKNWKGYQHSQLQQSLAFFESRPGEARSLLQAGWDFSDGSSFWNGWVMNSFARDNTFDGFYESYLNGRMKYFLRLADNIAQQSSTNKLISNFIKQQMPKGLFDRRLYMLEDLATEKNKILSKPLIFPRGIFDDKPTFKKGVQVSEEPEAFADWYSYGYDVKHKFQEFYAWDRDYEELLREELEKDTAFTKNSIHYSRESQIELLAKKQDLKVKKVRIQDLYLKLMAEFLFENVFGHELALPLDQFYLTQEERLKQEQEAIVQSQRPKGDDSPNIVKENFIWSKTIPFKSGRVFEPNVKLKDIGKFRNLLTDEKVDILLSYNNTEIGKQVIENELIIGAGSYEFIRREQLFKEIQQMKRLSLRSVRGMGVPIRLNLK

SEQ ID NO: 29 - protein, 1161 aa, Unknown
  Description of Unknown: Cas13 sequence
MENQTQKGKGIYYYYTKNEDKHYFGSFLNLANNNIEQIIEEFRIRLSLKDEKNIKEIINNYFTDKKSYTDWERGINILKEYLPVIDYLDLAITDKEFEKIDLKQKETAKRKYFRTNFSLLIDTIIDLRNFYTHYFHKPISINPDVAKFLDKNLLNVCLDIKKQKMKTDKTKQALKDGLDKELKKLIELKKAELKEKKIKTWNITENVEGAVYNDAFNHMVYKNNAGVTILKDYHKSILPDDKIDSELKLNFSISGLVFLLSMFLSKKEIEQFKSNLEGFKGKVIGENGEYEISKFNNSLKYMATHWIFSYLTFKGLKQRVKNTFDKETLLMQMIDELNKVPHEVYQTLSKEQQNEFLEDINEYVQDNEENKKSMENSIVVHPVIRKRYDDKFNYFAIRFLDEFANFPTLKFFVTAGNFVHDKREKQIQGSMLTSDRMIKEKINVFGKLTEIAKYKSDYFSNENTLETSEWELFPNPSYLLIQNNIPVHIDLIHNTEEAKQCQIAIDRIKCTTNPAKKRNTRKSKEEIIKIIYQKNKNIKYGDPTALLSSNELPALIYELLVNKKSGKELENIIVEKIVNQYKTIAGFEKGQNLSNSLITKKLKKSEPNEDKINAEKIILAINRELEITENKLNIIKNNRAEFRTGAKRKHIFYSKELGQEATWIAYDLKRFMPEASRKEWKGFHHSELQKFLAFYDRNKNDAKALLNMFWNFDNDQLIGNDLNSAFREFHFDKFYEKYLIKRDEILEGFKSFISNFKDEPKLLKKGIKDIYRVFDKRYYIIKSTNAQKEQLLSKPICLPRGIFDNKPTYIEGVKVESNSALFADWYQYTYSDKHEFQSFYDMPRDYKEQFEKFELNNIKSIQNKKNLNKSDKFIYFRYKQDLKIKQIKSQDLFIKLMVDELFNVVFKNNIELNLKKLYQTSDERFKNQLIADVQKNREKGDTSDNKMNENFIWNMTIPLSLCNGQIEEPKVKLKDIGKFRKLETDDKVIQLLEYDKSKVWKKLEIEDELENMPNSYERIRREKLLKGIQEFEHFLLEKEKFDGINHPKHFEQDLNPNFKTYVINGVLRKNSKLNYTEIDKLLDLEHISIKDIETSAKEIHLAYFLIHVRNKFGHNQLPKLEAFELMKKYYKKNNEETYAEYFHKVSSQIVNEFKNSLEKHS

SEQ ID NO: 30 - protein, 848 aa, Unknown
  Description of Unknown: Cas13 sequence
  MOD_RES (821)..(822): Any amino acid
MEKTQTGLGIYYDHTKLQDKYFFGGFFNLAQNNIDNVIKTFILKFFPERKDKDVNAAQFLDICFKDNDADSDFLKKTKFLRMHFPVIGFLASNNDKAGFKRKFSLLLKAISELRNFYTHYYHQPIEFPSELFELLDDIFVETTSEIKKLKKKDDKTQQLLNKNLSEEYDIRYQQQIERLKELNAQGKKIPLNDETAIRNGVFNAAFNHLIYKDGGDLKPSRVYQSSYSEPDPAENGTSLSQSSILFLLSMFLERKETEDLKSRVKGFKAKFIKNGEEKISNLKLTATHWVFSYLCFKGIKQKLSTEFHEETLLIQIIDELSKVPDEVYSAFGAKTKQKFVEDINEYMKEGNADLSLEDSKVIHPVIRKRYENKFNYFAIRFLDEYLSSTSLKFQVHVGNYVHDRRIKNINGTDFQTERVVKDSIKVFGRLSKISNLKADYIKEQLSLPNDSNGWEIFPNPSYVFIDNNVPIHIQTDEATKNGIKLFKDTRRKEQPEELQKRKGKLSKHNIVEIIFKETKGKDKPRVDEPLALLSLNEIPALLYQILEKGATPEDIELIIKNKLAERFEKIKNYDPETPAPASQISKRLRNNTTAKGQETLNAEKLSILIEREIEDTETKLDAIEEKRRKAKKEYRRNSPQKSIFSNSELGRIAAWLADDIKRFMPAELRKNWKGYQHSQLQQSLAYFEKRPQEAFLLLKEGWDTSDGSSYWNIWVINSFSETEDFEKFYENYLRKRAKYFSELAGNIKQHTHNAKFLRKFIKQQMPADLFPKRHYILKDLETEKNKVLSKPLVFSRGLFDSNPTFIKGVKVTENPELFAEXXNGIATGTKRNIPSSISMAGKETIMSF

SEQ ID NO: 31 - protein, 1241 aa, Unknown
  Description of Unknown: Cas13 sequence
  MOD_RES (644)..(727): Any amino acid
MEQNKLGKGIDYNPFKTVDKHYFGGFFNLADNNIQEVFDEINIRYKNGNLKPKVAIERYTTENTSLVEYEKFVAILTEYFPIVKEIDQKNKKDSNDKVIEKTRIERITDFRDAFILFIETIEKLRSYYTHYQHDDITIDNQLFIHLDKILLNTVLETKKKYLKTDKTKELLKNSLQAELKELYHLKINQLEQKKNEVDALIKEQKSKGKKTDKPFKYSKDRDQIINSIYNDAIRPFLYENANKVELSDKKKTAFNEKDASASERDFNLPISSSGIIFLLSCFLNRKEIEDLKANIKGYKGKVIKGETFDLEKNSIRFMATHRIYSVMCYKGLKNKIRTSESATKETLLMQMIDELSKIPDIVYKNISTDLQNTFTEDWNEYYKDNIENNENLENSKVIHPVIRKRYEDKFNYFAIRFLDEFVDFPSLRFQVHLGNYIKHSMPKNIGSVTTTREIKNKIFVFGKLNEINQSKNDFFNKNKEEEQETNWEIFPNPNYHFPMENSDELKNANKIGIYIDLKDKRKKDTLNEAIKKREKETSIYKKDLVHQIIDKNLDMHIGQPVAYLSMNDIHAIIFSILSQNVFTKDNKLNGGDIEKKIKDQINNQITEITEKDASIKILKNHSDNNSNYPNTHKLYDDISNEIEXXXXXXXXXXXXXXXXXXXXXXXXXXXXXXXXXXXXXXXXXXXXXXXXXXXXXXXXXXXXXXXXXXXXXXXXXXXXXXXXXXXXNEIEVLDKLMQKHEKRVKEYINTQEDKKYKPARKHILYNSEKGEIATWLANDIKRFFPKEFKENWKGHYHSEFQRNLAYYETNKKEVKTILNDLDYRKEIPFIDFSKNTLADFYFEYLKKRKIYHKNLWVEVNKLIKGENINKEKLFDNCFRIYKRKNYVSNVIDEKVNTILSNPIFIERGFIDEKPTIIPKMPLEGNEEHFAAWFVAFKSFKNNEFQNFYDTNKYPLETKDKTNSELKKIQTKTYNQKKNDWATWLIVQYIFKDIFSTDLQNVKLSELFQTREQRIQNQVKALDGERNQNFIWNRTIDLQLNEKIKIPNVKLKDIGNFRKYVNDSRVEAFLRYNDITQWMAYLPSNWQKEDESKPKPVNVIQLQLDDYEKIRREELLKEVQKLEKTIYNNTNVKTVLLQDGNPNFKNYVLNGLLEEIKGINISAFTVLHEKTNFDKIDFNVLENCSEIEQSATLIILIRNKFAHNQLPSSDCYQFCSKILTRDTEQTYANYYLKLFMILKDKL

SEQ ID NO: 32 - protein, 1147 aa, Unknown
  Description of Unknown: Cas13 sequence
MEETTTMGKGVAYDHTLFKDKHYFAGYLNLAVNNIENVFKTVYKNRFDIKQHNLYKILDSLDGQISEPDYIERVSFLKQYFPVLHYLDLHPDNKRFTKEEDKVKARRRYLINNLRLLIETLSKLRDFYTHYYHKPLSIEQNTFSLIDNIFLNVVIDVKRQKKKNDHTRQLLKDSLKEEMDILYQKTKASLKEKQKENTRIKLDSETINNTIFNNSFSHLIYRRKKADNDILSASCKSEYKGEPTENGINVSVDGLLFFLGIFLSRKESNDLRGRIKGFKGTVIKDLPDFPNEKNNSLKFMATHWVFTYLNIKPIKQKLNTNFSRETLLLQIVDELTKIPNEIYRNLCFKKQQEFVEDINEYIKEGDDIDTLNSSTVIHPVIRKRYENKFNYFVLRYLDEFVSFNSLRFQIYLGNYVHHIQRKKLSGTEYETERVIKEKINVFGKLSEVSNIKGDYFIQNNPDNEALGWEIYPNPSYNFTGNNIPIYFDINDQDKEKINEYKSIRNFSEKRILRKKNKKNKQEIFDLINNTLTTRVFTAEPTAILSLNELPALLYTILCENKTASEIENLLRRTYLKRLNTIKNYQPGTLPQSKITKNLNKSTNQESLDVSKLIKAMKHEISISNEKLTLIKKNQNEVKDTSHRRKYVFNSKELGIEATWLANDLKRFMPKKVRENWKGYMHSQLQNSIAYYSQKPKEALSILSSVWNFNDDNYIWNEGIKKAFNEKEFEKFYCKYLASRNKTLEKLKENLDNLEYKTDKRKLDKFIKQQNLDCLFHIRTYTIDSTQEQINKLLAKPLVFPRGIFDSKPTFVKNESVTEKPELFADWYTYTYKEHPLQEFYSFTKDYECNFKKEKLTVKEFVKNQEQLNPEEQLNLFKLKEDLSIKCIKNQDLFLKLVVDNIYNKIFEYNIDISLKNLYISRKERIAIGLKAKELNQINDSYIWGKTILYQDKQIRETKVQLKDINKIKRFLEEDKVKQILSYDINKQWEIEELKYELYIKPNSYEVIRREKLFKAIQEFESYILTINNFDGSNHPSILEYNSNPRFKHYVVNGLLLKKGLATNEEIEWLLAKGQKEFNTFDKSIVEKPEIIQKAFLLVLIRNKFAHSQLPIKEYYEMIRSYTKNIENLNTTEIIFQFTTNTINELKR

SEQ ID NO: 33 - protein, 1108 aa, Unknown
  Description of Unknown: cas12b sequence
MATRSFILKIEPNEEVKKGLWKTHEVLNHGIAYYMNILKLIRQEAIYEHHEQDPKNPKKVSKAEIQAELWDFVLKMQKCNSFTHEVDKDVVFNILRELYEELVPSSVEKKGEANQLSNKFLYPLVDPNSQSGKGTASSGRKPRWYNLKIAGDPSWEEEKKKWEEDKKKDPLAKILGKLAEYGLIPLFIPFTDSNEPIVKEIKWMEKSRNQSVRRLDKDMFIQALERFLSWESWNLKVKEEYEKVEKEHKTLEERIKEDIQAFKSLEQYEKERQEQLLRDTLNTNEYRLSKRGLRGWREIIQKWLKMDENEPSEKYLEVFKDYQRKHPREAGDYSVYEFLSKKENHFIWRNHPEYPYLYATFCEIDKKKKDAKQQATFTLADPINHPLWVRFEERSGSNLNKYRILTEQLHTEKLKKKLTVQLDRLIYPTESGGWEEKGKVDIVLLPSRQFYNQIFLDIEEKGKHAFTYKDESIKFPLKGTLGGARVQFDRDHLRRYPHKVESGNVGRIYFNMTVNIEPTESPVSKSLKIHRDDFPKFVNFKPKELTEWIKDSKGKKLKSGIESLEIGLRVMSIDLGQRQAAAASIFEVVDQKPDIEGKLFFPIKGTELYAVHRASFNIKLPGETLVKSREVLRKAREDNLKLMNQKLNFLRNVLHFQQFEDITEREKRVTKWISRQENSDVPLVYQDELIQIRELMYKPYKDWVAFLKQLHKRLEVEIGKEVKHWRKSLSDGRKGLYGISLKNIDEIDRTRKFLLRWSLRPTEPGEVRRLEPGQRFAIDQLNHLNALKEDRLKKMANTIIMHALGYCYDVRKKKWQAKNPACQIILFEDLSNYNPYEERSRFENSKLMKWSRREIPRQVALQGEIYGLQVGEVGAQFSSRFHAKTGSPGIRCSVVTKEKLQDNRFFKNLQREGRLTLDKIAVLKEGDLYPDKGGEKFISLSKDRKLVTTHADINAAQNLQKRFWTRTHGFYKVYCKAYQVDGQTVYIPESKDQKQKIIEEFGEGYFILKDGVYEWGNAGKLKIKKGSSKQSSSELVDSDILKDSFDLASELKGEKLMLYRDPSGNVFPSDKWMAAGVFFGKLERILISKLTNQYSISTIEDDSSKQSM

SEQ ID NO: 34 - protein, 1468 aa, Unknown
  Description of Unknown: cas12b sequence
MATAVDTSTTRAYTLRLSGGNNWRELLWQTHVAVNRGAWVWGDWLLTLRGGLPASLADGDAERRVVLALSWLSVESPASLAPQAHIVAYGSDARDERNRKVTERFRDILRRMGIKQQQEQEWLDACLPALMASIREDAVWVDRSACFAEAQQCYRGLSSEWARKTLFDFLGGEDDYFKPSAKEGASSKAKDFVQKAGRWLSRHWGAGKKSDPRDISTRLGKLAGVDPKAIDGHTGRAALEDLLRTLGSRPAQNADAEKLYRQLKRAVGWKGRPSKGAVALKKIRDAERVPNDLWKEIASTLREEAAVQSSQTSDHAAVPDWRSHWPAEITGLPMPYRVDRDYIWEHGVMLDHALRRVSSAHTWIKRAEAERRRFQQDAAKMGSIPEEARNWLDAFRERRSSSSGATGDYLIRERAINGWDKVVQAWETLGPNSTRDQRIAAARDVQANLDEDEKFGDIQLFAGFGDEHVDDPERCLADDRATCVWRNSSGRADGRILKDYVAATVAEHNQRRFKVPAYRHPDPLRHPVFVDYGKSRWSINYSALTAAQQRRKTTQKLAQAKTDNTRAKLQQQLASTADLRSVTLGVWDGNRIVKISQRWRSKRFWRDLDLDHFGSHPSAAVSRADRLGRVAARQDPGAAVYVAKVFEQQDWNGRLQVPRRELNRLADVVYGKGADPDFGKLERLDPRARRLWERLSWFLTTSATVQPQGPWLDYVAAGLPSGIQYTKSRAGYYLNYDANHGRKGRARLCLARLPGLRVLSLDLGHRYAAACAVWQTLTIEQMTNECRQAAHPAPSNDDLFIHLRHPTHKPQKSGRKKGRPVTKTTIYRRIGPDKLPDGTDHPAPWARLERQFLIKLQGEDRPARYASQKEIDEVNQFRNFVGLEPIVDRPRVDDLHSDAVRVARLGLRRLADAARIAFAMTAAKKPISGGHEVELTTAQRIEFLQDALLLWQSLAASRRYRDDWAEKLWQSWVVEKLGGPQPAEIADDLPRSQRAASLKTARQSLRKVAEKLSDGQSPSAAELHRLWAERWQQRQTEWRRHLRWLRRLILPRRKDHQQEDRPLQRVGGLSVKRIQTIRQLYQVLKAFRMRPEPSDLRKNIPAPGDRSLASFGRRILNHLERLREQRIKQLASRVVEAALGAGRISKPPGRDRRRPQQPVDRPCHAVVIENLQHYKPEDSRLRRENRQLMDWQARNLRKYIVEGCELHGLLFVEVSPAYTSRQDSRTGAPGLRCEDVSRTALQEAARRMHASHSRPSNSSPGGSQTQFEREVCRWINEFKRVEGSSSSLSARQAVLKAFLHHQASIPTSLSTILLPRRGGELFVSADPDSPLACGLQADLNAAANIGLKALTDPDWMGAWWFVLVDRASGQPVEEQVQGCPIWLSCGPLSNSNPATIDPSDSPTAARRSNGTGAKGRARANEYWWSSLSATTLPDHKAWQPTQDYWRDIEQRVVKRLLRLLDGSEWSED

SEQ ID NO: 35 - protein, 1375 aa, Unknown
  Description of Unknown: cas12b sequence
MNRIYQGRVSKIEIKDSEGNFRNVPVGSPDTCPLWRHHRIFQDAVNYYLVALGALAGTGSENAFVGLGSKDRVIHDLYSRLFDSWERFPRDMHGASSLRDSLRRTLPGLSERASLQDAFDAILSGNEANARERVLSLLSLIQDLGGDIQKGSKRYFPFFCEPATKATFPRARVGLLKVEGKDFVPRLLWSSDLEIAPDQVVEQLKFEYFANPNESVQPIEGNEARVRLIEALDNPQLGIELPIEILSDLRKRVHLIETDIRIPRYFFGGAGAELRKFRLDLFLIAAYVTPDPSILRALRNSFKEPSASKSSKKKDETEEVENLLRSLGDDPLILARGERGFVFPSFTSLPTWVGANAQKPIWRDFDIAAFAEALKSLNQFTAKTEEREEKLKKAEETLHYMLGISDAIPRSSDSETEEQAPSRPGKDPRWPLVAQLEKELGENLSEGTWQLSRSAMRGLRDIIGLWRKHPGASVVTLQKDVKTYQADEKHKREIGSVQLFLLLCEERYHALWQTETDDERGDESEENDDPARILSDAIEVHQIRREVERFREPIRLTPAEPVFSRRLFMFSDLTDKLAKVKFGETTEENSEVKSQFVEAAIALKEGENLKEARVRITFSAPRLHRDELLGGAESRWLQPITAALGFSNPAPSVKFDSAVALMPDHMDDGRIRHLLNFPVNFDSAWLHQSIGKADLWKSQFNGTKDKNLHLHWAGTARDTTRKNTWWENRTIIENGFTVLSNDLGQRSAGAWALLKVTCSRPDTKHPVRSIGHDGTREWFATVLATGIHRLPGEDQRILKNGKWATEQSGKKGRNATFSEYEAACVLAKNLGCESVENWLGMSGEKSYPALNDQLVKIANRRITRLGTYHRWSCFSPEKFEDPARRANVIGGQLAELSAYQDENVTVSADILKSGDFEGFRHRAGAAFEALRTELEVHLVNLANLTAPLRQKVWSWQKRPDSSGYGDLLMVDLDDCHPKIRGQRGLSMARLEQLEGLRRLFLRYNRSLDRSPGIPAKFGREDVGRTSGEPCQALLVKIDRMKEQRVNQTAHLILAQALGVRLCPHRIEENERKSRDLHGEYEKIPGREPVDFIVIEDLSRYLSSQGRAPSENSRLMKWAHRAVRDKLKMLAEEPFGIPVVETVPAYSSRFHALNGQAGSRLHELHELEAYQQQSLINLAAKTDFQNRDRSKAAGELFEQFQALAKLNERRRAEGKKVPRTLYYPKSGGPLFLASRDGDTIHADVNAAINLGLRAIAAPACIDIHRRLRATKEKEVYRPRVGNAREKSAFSKDDIIQPSGAPSKKFASSSSPNFFYEPEDLKQANGEPLFDRAMFGEYSLVSGVSLWSMVNNAIYIRCVELNRTRLHGKDPDDQIPM

SEQ ID NO: 36 - protein, 1254 aa, Unknown
  Description of Unknown: cas12b sequence
MSITRSIKVKLIVPRDASLEARQLREGLWATHLFVNDGCHYYERLLLEFRQRDVCVGKDDAGKDVIVPAAEWADRLRARLGRNGMVPSHIEAALPIFRELYENMVPSALKAKSGTGQAGRSWHSKLVSPTSRGGEASAARIDVLRPLLPVSGDDPAFEPAARALIEEAGDELLTSTGRCPAWVTAYRKGPEGSAWVEKLRIQLREAVEAGDFDPPSDPQILAAGAVPAAPPLGAGIDALRPLLPLLGGDPAFEPAARALVEDIGDELFTSTGRPPTWVTAHPTWVRAHRKDAECLEAADDFKWVERLRQRLRDDAKAGKFEQPLHERLGALGALPVAKPIGAGRVVSRADLTVFERGAMELAIEHLIGWESAGHRARAQYVERKKRHDDLLQWIEAEAPDALLAVRAYEAARTIHLATLGELGAAPQYTLRLREIRPWRKLREWLLQNPDATIDERRRRLATMQTNDPRGYGGEALAWLAAPERRALVEHPAGDVVTRIAVLNIRKSILDRSRLFPTCTLADPVEHPRFAKFGKPGDKNSAGYALAVDGVRREAIIKILVPRQDGLLVPTDLRVPFAPSGQMRDLRASGLDISYERQDGRGRQAAKLQGGNLMFDRTHFARCGAPGPEALGSVWIKVALDLSSPAASLAMKTATPVRTYLSTAVRGRPESTKYEKAAPPEGFRVLSVHMGLRTAATASMLRFGAPEEGGHEVPVSGLAGETLVAFHERTVTMKLPGEDPDTRTEANRGVAKRELRGLGRGIGCLKAIRRASASATPEDRAEALVIIETHVGQGDRHGWAPAEAVGRLDPHGDPDDWKTACAALYAAVEADLGVAISSWRKAARAGGATGMLGGKSLWAVDHLERSFRFLRSWDLRARPHDGDPRRPRPGYASKLLHHIDGVKDDRVKTTADRIVQAACGRAWIGGPTVKRGTQDVRLPGRWEQRGPRADLILLPDLTHFRFRSDRPRAENSRLMRWAHRQLAIYVRMQAEVEGILVADTGAAFTTRFDAWTGAPGVRCEPVTADHLRGIAKREDYWLARLLREGALKHLRIDPASLRVDDLVPMDHGKILVALDGVDLPGLRILDTDVNASQGLGRRYIEGHGLAYRLPGARVPRGEGEREAAVVHIKGKRLASAMGGTVVVLRASEGPGDITWTAEVYDRPQGARKALGLSLAAFNSIATAAVDDEGPAPENDDEALEEEAEEALGIATGERIVFFRDPSGAVAGGGWLEASAFWGIANRMVTDRLRELGRLG

SEQ ID NO: 37 - protein, 1388 aa, Unknown
  Description of Unknown: cas12b sequence
MSLNRIYQGRVAAVETGTALAKGNVEWMPAAGGDEVLWQHHELFQAAINYYLVALLALADKNNPVLGPLISQMDNPQSPYHVWGSFRRQGRQRTGLSQAVAPYITPGNNAPTLDEVFRSILAGNPTDRATLDAALMQLLKACDGAGAIQQEGRSYWPKFCDPDSTANFAGDPAMLRREQHRLLLPQVLHDPAITHDSPALGSFDTYSIATPDTRTPQLTGPKARARLEQAITLWRVRLPESAADFDRLASSLKKIPDDDSRLNLQGYVGSSAKGEVQARLFALLLFRHLERSSFTLGLLRSATPPPKNAETPPPAGVPLPAASAADPVRIARGKRSFVFRAFTSLPCWHGGDNIHPTWKSFDIAAFKYALTVINQIEEKTKERQKECAELETDFDYMHGRLAKIPVKYTTGEAEPPPILANDLRIPLLRELLQNIKVDTALTDGEAVSYGLQRRTIRGFRELRRIWRGHAPAGTVFSSELKEKLAGELRQFQTDNSTTIGSVQLFNELIQNPKYWPIWQAPDVETARQWADAGFADDPLAALVQEAELQEDIDALKAPVKLTPADPEYSRRQYDFNAVSKFGAGSRSANRHEPGQTERGHNTFTTEIAARNAADGNRWRATHVRIHYSAPRLLRDGLRRPDTDGNEALEAVPWLQPMMEALAPLPTLPQDLTGMPVFLMPDVTLSGERRILLNLPVTLEPAALVEQLGNAGRWQNQFFGSREDPFALRWPADGAVKTAKGKTHIPWHQDRDHFTVLGVDLGTRDAGALALLNVTAQKPAKPVHRIIGEADGRTWYASLADARMIRLPGEDARLFVRGKLVQEPYGERGRNASLLEWEDARNIILRLGQNPDELLGADPRRHSYPEINDKLLVALRRAQARLARLQNRSWRLRDLAESDKALDEIHAERAGEKPSPLPPLARDDAIKSTDEALLSQRDIIRRSFVQIANLILPLRGRRWEWRPHVEVPDCHILAQSDPGTDDTKRLVAGQRGISHERIEQIEELRRRCQSLNRALRHKPGERPVLGRPAKGEEIADPCPALLEKINRLRDQRVDQTAHAILAAALGVRLRAPSKDRAERRHRDIHGEYERFRAPADFVVIENLSRYLSSQDRARSENTRLMQWCHRQIVQKLRQLCETYGIPVLAVPAAYSSRFSSRDGSAGFRAVHLTPDHRHRMPWSRILARLKAHEEDGKRLEKTVLDEARAVRGLFDRLDRFNAGHVPGKPWRTLLAPLPGGPVFVPLGDATPMQADLNAAINIALRGIAAPDRHDIHHRLRAENKKRILSLRLGTQREKARWPGGAPAVTLSTPNNGASPEDSDALPERVSNLFVDIAGVANFERVTIEGVSQKFATGRGLWASVKQRAWNRVARLNETVTDNNRNEEEDDIPM

SEQ ID NO: 38 - protein, 1172 aa, Unknown
  Description of Unknown: cas12b sequence
MPTRTINLKLQISPKTDEGRKIRSALWTTHSEINKAVAEIEKLLLLCRGEKYYTTNSKDEEVEVPEPQVKTDALEMARAVQAKNGKAGTGSDEEVLSALRMLYEATVPSSVLDDKGKPLSGDAQSIGGSYAGPICDPETCRIKDVDRLFESGPFAETASKKFTQLPAWFNEVTKKNFNKDEPEKFVKVGKDKDEKFYEIDLRQADAWYESPEVKDIVSKNKAFNKDKWWKNKRDGVDTWAAEFVKKQFDLRKDVRVSIREELWDRLGLLPLGSLYFKKPVGNKWNRMAFRLAIAHLLSWESWNHQTLAEYTKYTKYKDGLIELAGASRSLEVRFEPLRQYQKERHEELSRTSFVDDDRPFTIGARMIRAWGRVREAWRNKGDGIDERRQILADLQTELKGKFGDPHLFLWLAEAGRESLWRDEDVLTTFVEINIAQRDLERHRPYSLMTFADARLHPRWAMYEALGGTNLRNYELTPEGKVKIPLLICEKDKLSEKTFTIPLAPSGQLKSLEIKSLPKKKVKISYASAHQFYAGIPGGSEILFDRLFMENRASSALANGSCGPAWLKLTVDVESKAPPEWLDKKGRVQTPPTVHHFKTGLANKSKHTDKLEPSLRVLSVDLGLRTFASCSVFELVDEKPAKGLFFETDHPHLWAKHERSFKLTLPGEEAGDDPKVAQARREAMDEVYSLRRDMYRLKDILRLKIISAPNERREKLESKIAEMREKQDARAVVTSNFFERLSEKCDLNPPMWEHSCNEIHRDAEKAFSARIGEWRKRTRKRPGSWEEWRETRSYHGGKSYWMIEYLEAVRKLLIGWSTHGRDYGEINRQNKKRYGTVASKLLKHINKLKEDRTKAGTDLIIQAARGYIPLPGKGWMEKYRPCRVILFEDLARYRFKVDRPRRENSQLMKWGHREIINEATLQGEIYGMVVETAGAGFSSRFHAKTGAPGVRCRYLKEDDFENGAPKEFLVRQMKNLMKGDRLEPGLLVPWDGGELFATVDNGKPIVIHADINAAQNLQRRFWTRFADAYRVNAVEENDNWVVTDTGVRVLGALEMAVHGEADRKPRTGFTLHGTLQSGAELKAEGKKTDIKDVEEDKDDSISSEIIELQDEKERKGRETFFRDPSGGILDPGKWYGSKRFWGRAKGAVTEALLDNQGANNALEEKPGNDELPF

SEQ ID NO: 39 - protein, 1108 aa, Unknown; identical to SEQ ID NO: 5
  Description of Unknown: cas12b sequence

SEQ ID NO: 40 - protein, 1450 aa, Unknown
  Description of Unknown: cas12b sequence
MYRGFCTVTATSGGWQSTTFLAGAQMADTTTRAYTLKLQGDRLALWRNHVIFNNGVKAWGEWLLCLRGGLPASLADHRDSLDVSKGEISRTFKERTAAITPATIRQELKFKAATEKKVREEVASRRKKVTETAVAKELLAARRSELRRILALSWLCPETPVQLVPQAAIVAAADDSDREQKVLDGFRQILKRKGVSDVAGWVQDCDATLRATIRSDAVWVDRTACFCSMPRAVRPSEVDAAKHLFRLFGSMSDYFATASASSGPAEPKDFANTCRDWVSSFWGGGEKSNKASILAALSAIAQIKPTRVVGKRGPAALAVIAGVLEQKPVDDSVEALARAIGWLSGRPSAARLAINAIAASPRVSQKLWDRLVLACEKDCGRQKSKLAFEGSASTIASALEPRLAGLTGMPYASTGRELIGEYATMLAFAMRRVSQIHTKAKQAEAERRSFAPEQARLALVPSAARKWLEDYVEARTAASGAVDGYQLRKRALGGWADVVAAWSRCETSEDRIAAVRELQADWEKAGDVQLFEALAADDAICVWQSANGKTAASILTDYVRAAVADQNATRFKVPAYRHPDPLRSPTFVGFGNSQWSIAYSAQGEARERRKLLDRASGSAKDAERAREGLAREAVLQNVSLDLWAGDKMVPTQFRWQSRRLLSDLALHSVPAMKGAKVTRATRFGRARIAAGPVLLDGIADDTPWNGRLQAPRRQLEDLARILDAKGLPFDDESKWPPKVRSRLKHLGWFLTHSAKLTPSGPWLDYVAGGLANGWKWAEGREGACLFREDNKDRKGRAKLILSRLPGLRLLSVDLGLRTSAAAAVWQVVSKRQLTAAKDGAKSVSDTDLFCLVRTGDRTQVYRRIGLSAWARLERQFLIRLDGEKAAARPATTNEWESLQSFRAWLGCGIERRPEKLPPVDSLQQSAERLCRLGLRRLSDLARVAYLLTAKERPIMGGRTAPLDEEGTVQAAQDALSILHALGSSEDFSDARLQGIWRTAIGDTPPLAARLTKKQRQELREALRPAAEKLRGKAALGKELADLWKERSAAWAKHLRWLRDWVIPRFDKRKNGERVRSARGVGGLSLDRIATIRGVYQIMRAYASRAEPTNLRAGVERLEKAAAKKLRPEFGRRMLAKMERLRENRVKQIASRIVEAALGVGSEDRLHWERGRRRPTAAISDPRFAPCHAVVIENLENYRPDEKRTRRENRGLMSWAARAVGKYLAEGCQLHGLYLRQVSPAYTSRQDSRTGCPGLRCNDVRAQELLNPEGWIGRLVARAAEAVKEGKATPRQRLLVTLAESARAGIAESAAVRIIAPGGQLFIAADPQSPASNGIHADMNAAANIGLVALLDPDWPAAWWRLPCKAATGYVDESKVGGSEAVPLGRAILEVGAEAGKVYVNAWSDPQDSAVSRREWTDTKRYWRDVEERVVEILLASNRGGRRGKPGAVPF

SEQ ID NO: 41 - protein, 792 aa, Unknown
  Description of Unknown: cas12b sequence
MATKSFEAKIVCKPDEKYTAEQKKQFLWFTHQVFNDGVRKVIPYVFKMKRGELGPEFQAIYYAITSSQDAIGKLEAVINPDWTSGKIGKSDPNKWKELLKYQELEKGFRQRLKEEGIKSTKKFRKELEDEKKKLAKEIGQKDIWADAAAILRNKNLLLFNRDELLPNLPSEFRRKIYEMTIQLIHGHQELVANWEDEHAEWLIEKDKWEEEHPEYMNVRPIFEKFEKEQGKVKGSRIRWLAYLDFLSSKPELANWRGKAKETIPLTKEERAGFRKPGQHFAAFFNKNPELQELDRLHKEYQEKFARTQSKRTPHPDGFKHRPTFTLPDAMRHPVWYSFKGATDPTKGSTYRNLDLENCTLDLKVLTAMEGEGRNPGGMIQYAFEPDERIKGFRYVGTTEKGKRAKGYIYYDPILEKERPAKIQGIKLVFRPPRPDGTAYLIFSCQIEDEKPKIKIWKDKEEESPGEITKRKKTEVYPPELITLAIDFGQRHLGAITICKNNNGRPEPIRFIPAYPKRRKDRESKPVSAWLAKIPGLTFNAVGMHEKEISAGMSRRFQDPKSIRQAGEKEGRKSKGQHIPETETPWAHLREHIANMKEDHYKKAANLIIRTALQNGAQVILIENLRNYRPMLERTNLENRRRMQWAVRQTAKFLEDTARPLGLIVRQVSSAYTSRFCSSCGHPGARVSLPGQKNWEKFYAEKYGKERKMIAVAGGQFFCCPACKKIINADINASLNMHKVFYQNFIWPGKIDKKDTKNFIWQGKNYNWDQIADDVQSFLDQKAGIKKEDDIPY

SEQ ID NO: 42 - protein, 1382 aa, Unknown
  Description of Unknown: cas12b sequence
MAYGSEAPDERNRKVTERFRIILSRMGINQQQEQEWLDACRPALTASIREDAVWIDRSACFAEAQQHYPGLSSEWARETLFDFLGGENDYFALPDPEAAPSSEAKDFVQKAGGWLSRHWGAGKKSDSTAISTNLNRLAGVESKAIVGRCGCDALAVLLTTLGGWPAKNADSGTLYHQLKQAVGWKGRPSRAAKALEKVRDAPEVTDALWRQTADTLRQEAVAQSSRAAGGSGVPAWMPAWREDMEARLGMPYRGARDYIWEHSVMLDHALRRVSSAHTWIKRAEAKRRRFQQDADKIGSIPAKAREWLDAFRERRFSASGALRGYLIRERAIDGWDRVVQAWASLGPNCTREQRIAAARDVQANLDEDEKFGDIQLFAGVGDEDEGDPQPCLADDDAICVWRDLNGRADSNILKDYVAATVAKHDQQRFKVPAYRHPDPLRHPVYVDYGNSRWSIEYSALKAAHQRRKTTEKLVQAKTDRARAKFQQKPADTPDLRGVTLGVWTGSSIEKVSLHWHGKRFWKDLDLDHFGRDPSATVSRADRLGRVAASQHPEAAVHVAKVFEQQDWNGRLQVPRHELQRLADLVYGKGGDPDFAKLGSLDERRTRRQWEHLSWFLTTSTTIQPRGPWLDYVAQGLPQGIQYKKGRNGYYLEYAANQGRKRRARLCLARLPGLRVLSLDLGDRYAAACAVWETLTREQITQECHQAGHPGPSQDDLFIHLRHRTGKPQKSGRNKGKPVTKTTIYRRIGPDLLPDGTPHPAPWARLQRQFLIRLQGEDRPARFASQHEIDGSNRFREFLGLPPLADRPRVDDLHRDMVRLARLGLRRLADAARIAFAMTATKKPISGGREETLATEQRIEFLQDALVRWQALAASSRYRDDWARQAWQEWIVEKLGGPQPAEIADELPRSQQATRVETARRSLREVAAKLSNPQSSSATELHGLWAARWQERQTKWRQYLRWLRRLILPRRKDYQQANRQVHRVGGLSVKRLQTIRQLYQVLKAFRMRPEPSDLRKNIPAPGDPSLASFGRRILHHRERLRQQRIKQLASRLVEAALGAGRISKRLGRDRRRPRQSVDAPCHAVVIENLERYKPEDSRLRRENRQLMNWQARNLRKYIVEGCELHGLLFVEVWPAYTSRQDTRTGAPGVRCEDVPRSVLEEATRRIRALGSAPSGSSRGRSETRFEREVCRWIHEFNRVVGSSSGLSPRQSVLKAFLDHQAAIPTWRSTVRLPRRGGELFVSADANSPLANGLQADLNAAANIGLKALTDPDWMGAWWFVLVKRDSGQPVPQQVQGSPIWESCTRLSSPATVDSSDSPAGARRSKGRGARGRARATEYRWSPLSAMTMPDNKTWWPTRDYWPEIERQIADRLLREQIDPENRF

SEQ ID NO: 43 - protein, 1272 aa, Unknown
  Description of Unknown: cas12c sequence
MKKTSPLKRSALRTARRQIARGCLPIGNRDISTTRTRVLPLADSVADAVWNQARTAALTLRGFGSGSLFDLLLDLHASGLRLFSSNGEREGFLLKQKFDAGKFDRAAAKDVGEDMPKFTAANLRAALVAIPRGGGPDTDAKALATRLARAVGVKATKLDKPPKLLKDMAKELAMAFPTWKELSTANGEVGAVIDDVARMYGLRWPSLRRGWAFRLPEVTRELGSPTLAFDPDAPVIDETSATARFAAIVARYLPECGGLTDSAAAKGVQARITTTNANGLSWLFGVGLRGMRDLPVDTVADTLAIDVTRGRDALRALVNDIKALPRLGEFGDRVYVESRATLQGAVDSLIANYVGRLADLVASADALEHDQPRPPVLDDADWKPAIFDGMGFTPWEVEDMLDARPVEVARLRLALGVLAGTTPAVAGDFARALADVEAFGAWAARTEAVAALINARVKVLKAPESLRLRGVLGGGRWKAVVSIHPDEGEPAQVIPQLDTQLQALLDDGQRAFDVLVADYTPTFAAALEHARSDMRASLADKGREAPSAESIDLLARRKLLDMVARVTRRGSPSLGHAFLAACAVQGLTRPGTATERSLRGHILSGEQALFVHPYARARSIVRLEHAGLLRLDLDALLTAMERDAEQRADVREQIVLRFTRQSLLLGGLPGRIRLAKVPWTQEAAAASGVRGAPWLKLHPDDAGTVARSEVIKAFTARFHLSANGLLYRLNRMRFLERYDIRCFIGDTLLFAPKAGAWTPPEQYRHGKYAHWLSHPDLPRTEGGAVDVVPAARWLTEASRRADEDGRASAVALLAQFPHEWVAACEFEGAPVYEGVFPCEGKIGGWMKRRGYRLAPPRHFAGELLAAFKDASVSPHGLTFEREMLREGTTVRELSRRVVAAYPIAVPTHPDAERPWSPLHLMGLDLGEAGLGVCLRHIGTGAETTLLLPVRKTRLLAHREEHYRRKVQPRQAFRKGYGDAMELAVKAAIGEVCGIIDNLIVRYRAVPVFESAVAQARGSNKMIQRVFAGVVQHYTFVANNGAAQTVRQSHWFGAGRWSYTYGADLLPAARQMTEKQLLKAKAEAVFRPAMGFPGVMASGYRTSLVCACCGEDVLDAVDAAAEGGQVALTTDAEGSGVLDLGGRSLRIKLEAPSPNPIVQKAARRKRRRTPWEALADRTWTLTHKTDRADLVATLRRGLRRPPASVQGHATSGWEFHCAACGHIAQADVNAATNLVRRYDDRVRKMEQARAHWDDPSVRAKLASELAERAAARS

SEQ ID NO: 44 - protein, 1262 aa, Unknown
  Description of Unknown: cas12c sequence
MLTTKFKLELPAGCPLREDAATFDECRKLYDVVEGCGNGTLTGFLFSVILSGFRIFPDGKTAEIFANRSVYDEDEFRSALVEAVGAPLPRFTVKALIKRLQMEVRARGNKDNRFVAEVMMKEYRQTLCGKTLPKGVDESYVDRLFEEMARELTSRYRSWNELKGDLLGACKAVDAALRGFGDFPSLATMVTRAAARRLPKDSTIVFDPQSPCIDVQTIGVDAMPYAAVSTILSYPESVGEKRRDFVQNHLTTPSAAGLSWLFNRGLELFSEESVEELCRLFHVPEDQRTRIVQIQNAARATPRQSFFLKKGGAPLGYHDFRSAFAGRINSWTANYLNRLEELQGLLHDLTDELRLPDLVRNGEDFLATTDCRREEVEILCRSFSRERDRAQTAVEHLIGADPLQVVSDVAAIEEYSRIVNRLCAIKEQIVNSLRQAEDDKASRWTALWSEVKDEFQPWEKLIRLPKLNGMSGGVPPAQDELETILARYSDVGRGASEHFDAVMEWAAKTGAEGDVLKKFAETEQQRADQRAPGKYDGRELALRLVLQRVARVVRDRSDACAENVRQWFLKENVFAERKDFNKFFFNRLGNLYVSPFSNRRHAGYKLSDGLVERSGAVWRELLALVKEMRGAYASFSEAGETFLRLESLLMGMRIGALTKNIPAEVAALRLDDETALESVSEGLKLQLQQAEVPPSVLAKAFNVYVSLLSGCLIALRRERFFLRTKFSFVGNTALVYVPKEKSWPMPSRYEASPSWTPIFENDVLVRLSTGEVEVAETFRRAVALWGRTTDPVLKKALRELFHQLPHDWCCQVSVRSSGDMTPAKRKEDDRDVLIVEKKGKYDSTIISKKIAATALVRLVGPSTHKERLNRLLLDVGEVACDMTLLADQEILQKVEDDRVHLSPGKLQFSLSVPISTPAEQCEDEVKSERKSTHFRRIVAIDQGERGFAFAVFRLEDAGKKGAQPIAQGFVNIPSIRRLIARVHSYRKGKQSVQKFSQRFDSTMFTLRENVAGDVCGAIAGLMSRYRAFPVLERQVSNLASGGKQLELVYKMVNARFLDDRIPMHSLERTSWWCGTSDWVIPDLWVEVPESYAVKAKKDEILEKDGKFYRTLRITPGAGVNAKWTSRICSQCGGNAMELIEKAREEKVKTVTLDANGEVTLFGRTLRLYKRPSEERSREARRRNERAPWTEPRADVRLSLDDFRRAVAENMRRQPKSLQSRDTSQSRYFCVFTDCRCHNKEQHADINAAVNIGRRFLESLLRE

SEQ ID NO: 45 - protein, 1262 aa, Unknown
  Description of Unknown: cas12c sequence
MRRQHHGGQNARDWRRKVAAAALRQKESVFTYKFGLSVNDGDFDFDAAARTYDITEGIERGSLIGLVCAVHLSGFRLFSKVAETRQFLNRSRYPENEFAQALAAHTEIENPSVTVQSIESVFVTPPRKQDGVARLWSADELAKRLFQTWNNRSPREGERNHPELLLAQGIARAVTKAFSGWKELADNAVHALTCADNYLATLGNRFPKLSDLPPLTAGSTQTGTLAFDPESPFLNMTGNEDIWLHQVVAVCAGRLKRYMPEIDPSSRKFASRLTDSIVSSQNNGLSWLFGNGLRFLRQSSIAQIAETLSVSQNEHRRVEQLKEFADAIPVNPFFATDGYAEFRGSVGGKISSWVSNYWKRICELTVLHSQPPDITIPEGLLASENATLFSGQHTAAAGLVALSARLPSQVRDAGKALFVLSGDGVPRADDIATVEDVAGELAELTGQLAMLDNRIQQEIERAQDANDEGRVGSLASLRPNPTKELKEPPKLNRISGGTADAAGELARLETSLNDLIRARREHFYRLAEWTGNTASLDPLPALAERERKALTDRGMDPTLAEADEYALRRLLHRIAGMARRLSPNEAKRVRETMTPLFLKKREANLYFHNRAGALYRHPFSNSRHQPYSIDLNRARATDWLAWLEERAREMLGLLGSGAPANHEYLRDLLSIETFVFTTRLSGLPAQVPGYLAKPKSDLTNIPPLLAAQLDVDEVSRDVALRAFNLFNSAINGLSFRAFRDSFIVRTKFLRLGHDELFYVPKARAWKPPADYRSAKGKISKGLALPAVKRNEAGSILPRETTQGLSRAKFPEGSHALLSQAPHDWFVELDLRHDKMPQLAGLPVKMNADGLKGWRARRRPTFRLAGPPSFKTWLDRALTSTAVKLGDYTLILDQSFKQSLRVEDGEVRLSAEPAGIKAEIAVPVIDARPFPETEAEALFDNIIGIDLGERRIGYAVFSLPALLKSGNPTRVKPTVVGSVAIPAFRRLMAAVRRHRGSRQPNQKVSQTYSTALQQFRENVVGDVCNRIDTLCERYRAFPVLESSVANFETGANQLKLIYGTVLRRYTFSNVDAHKSARSAYWYSANRWQHPYLFVREWNKAQRTFTGSAKPLAIYPGVTIHPAGTSQICHRCGRNALRALRNMPDRTIRVGKDGLIVLADSTIRLLERADYSDRELKTFKRRKQRPPLNMPVPEGARPRDQLERVLRRNMRQQPQSEMSPDTTQARFTCVYTDCGFEGHADENAAVNIGRRFLERIDIEASSRT

SEQ ID NO: 46 - protein, 1283 aa, Unknown
  Description of Unknown: cas12c sequence
MTHAKKIPFPVLKRSTLRKARQRIAAGSITAGERPFNSTVTRVVPVKDPVSDQVWAVAREAAMTLRGFGQGSLFDMLIHLHADGFRLFPSGREREAFFLKDLFDPTEFDDGARRAFGDVMPGFTANSLREILGAPARKCGKVTSVEILLPRLSKGLGVKKSAAPPEVLSSLAAALCEAFPTWSLLTAVDGGVGKVIDDVLRTHGSRLPSLEKAWSTNLPEVPKGLGVPTLAFDDQAPAQSEQTPTGRFAGVVARYLAETFASNPEATAGDASKAVQAKVTTPNGNALSWLFAVGRRAMCSTTLDELAIGLNITSPRGRHALSSLKERMMALPALSVLGERAYPDSRATLQGTVDSLIANYVNRLFELSSSATSIAQTKLILPAAIQGDTAVFDGMPFSAEDVGALFEQLPSEIAKLEHAVKVLVGKERTSTLGYQKAVDDVDEFGVWASSVDAVIGQINARLKTLERAQEPLGKLMGDGKLKRLVNIHEPEGPAVEIIPVLDQELQDVLTSCRTAFADLEARYPMTVAKAQRHAEAEVRNALELASRKEGGLSLASADVPALAKRKILEPIISIARRSSPAMATAVLTECLRQKLIVKGTGSERSLRGYVLSGEQVIYAHPLSRRRSIVRLDREGLQNFDALEFLDALQKDATQRTNVRESLIVEMARQSLLLSALPDRIEIGAISWQTPSQNQHAPWANLRPVNGTVGRSETIKSFTAVFHSRISGLLYRLNRQKFMEKYDLRCFIGSTLLFSPKNADWAPPPQYRHGRFSALLARSDFPWEGAEGTHANAVRLAKFLIDETRNATDLQQAIAAKALLAQLPHDWVVCCDFDGAPSYEGAFVSAGEVSAWAKRSGYLLTPPRHFAGAFLEGFKSTKISPHGLTFERMLERDGDSVIETGRRVTAAFPITQEVAPAAQPWKPRHLAGLDLGEAGLGVCLKNLDNGHEQTLLLKTRKTRLLAHSAEHYRRKDQPRQVFRKQYNQSSENAIKAAIGEVCGLIDNLIARYDAVPVFESQAAAARGSNRMVARVYAGVLQRYTYVVGNGAADATRTSHWLGANRWSYSFGADVIPKVRDLSPEVLRSIKKPENVFRDALGFPGVLANAWRTSMICSVCGTDPIGALEEAIAANQISFVTDNEGEGSLDLGDGRKVTLRVEVPTSSALTKREASRRKRRAPWEAKVGTVWTLTRKSHRDDLLTTIRRSLRRPSSTFQGSTTKQWEFHCPCCGQIQQADVNAASNLVRRYFVRASDNARARQHWADDSKRLAFIASMGPDRSAREEKVS

SEQ ID NO: 47 - protein, 1125 aa, Unknown
  Description of Unknown: cas12d sequence
MRKKLFKGYILHNKRLVYTGKAAIRSIKYPLVAPNKTALNNLSEKIIYDYEHLFGPLNVASYARNSNRYSLVDFWIDSLRAGVIWQSKSTSLIDLISKLEGSKSPSEKIFEQIDFELKNKLDKEQFKDIILLNTGIRSSSNVRSLRGRFLKCFKEEFRDTEEVIACVDKWSKDLIVEGKSILVSKQFLYWEEEFGIKIFPHFKDNHDLPKLTFFVEPSLEFSPHLPLANCLERLKKFDISRESLLGLDNNFSAFSNYFNELFNLLSRGEIKKIVTAVLAVSKSWENEPELEKRLHFLSEKAKLLGYPKLTSSWADYRMIIGGKIKSWHSNYTEQLIKVREDLKKHQIALDKLQEDLKKVVDSSLREQIEAQREALLPLLDTMLKEKDFSDDLELYRFILSDFKSLLNGSYQRYIQTEEERKEDRDVTKKYKDLYSNLRNIPRFFGESKKEQFNKFINKSLPTIDVGLKILEDIRNALETVSVRKPPSITEEYVTKQLEKLSRKYKINAFNSNRFKQITEQVLRKYNNGELPKISEVFYRYPRESHVAIRILPVKISNPRKDISYLLDKYQISPDWKNSNPGEVVDLIEIYKLTLGWLLSCNKDFSMDFSSYDLKLFPEAASLIKNFGSCLSGYYLSKMIFNCITSEIKGMITLYTRDKFVVRYVTQMIGSNQKFPLLCLVGEKQTKNFSRNWGVLIEEKGDLGEEKNQEKCLIFKDKTDFAKAKEVEIFKNNIWRIRTSKYQIQFLNRLFKKTKEWDLMNLVLSEPSLVLEEEWGVSWDKDKLLPLLKKEKSCEERLYYSLPLNLVPATDYKEQSAEIEQRNTYLGLDVGEFGVAYAVVRIVRDRIELLSWGFLKDPALRKIRERVQDMKKKQVMAVFSSSSTAVARVREMAIHSLRNQIHSIALAYKAKIIYEISISNFETGGNRMAKIYRSIKVSDVYRESGADTLVSEMIWGKKNKQMGNHISSYATSYTCCNCARTPFELVIDNDKEYEKGGDEFIFNVGDEKKVRGFLQKSLLGKTIKGKEVLKSIKEYARPPIREVLLEGEDVEQLLKRRGNSYIYRCPFCGYKTDADIQAALNIACRGYISDNAKDAVKEGERKLDYILEVRKLWEKNGAVLRSAKFL

SEQ ID NO: 48 - protein, 1183 aa, Unknown
  Description of Unknown: cas13a sequence
MPIVKKFGRSQTSLSDRKIVLKMETAARNIPDFLLSDPEAVIGQWASAMDKIAKKPKGKDKPSSYQRKFRERLGKAIWADLTGPEGPLRDVPAAELEDLRKRWDRRVHPYPDGTKDGPKPATPKGRLYTRFAGEVGYGKADAVAIARDIRIHLLETEFKTGGGTRDAGRAVRRASSIEKNVLKKARVPQRPKPPQEAAWSKEDEDRYFIPHDVARKIVLAAKAQEKEDHRVAWRTAAAVLFEHFGRIFQQDGRALSFAEAEKQMPGLLALHRAVEGYYRQALKRHRKDRREHEARPGREKGTGRRKVSAILPKDKTALLALIGHQHQNREIAALIRLGRILHYEAGRRGNSDMVANINRNWPADVSESHYWTSAGQIEIKRNEAFVRIWRSALSHANRTLGDWLSPDEVANDITMSWESKHEKSGKRKTGKLEENREEAEAHAPVIFGGSAERLGTGDDFQKTLEAICEVFSQLRHSSFHFRGLDGFKDALTKTVKTCDPGAVARLQDLHAEDQANREARLKEDLRGAHAELFLDEGRLAEIWALLHPKSTEKTLPPLPRYSRVVTRAENTCNGLKLPKSVNRESMKVPAIHCRYILTRLLYQSGFRTWIAEAPAAQLNRWIETATERAQKATVGITKNEADRARMVGQIKVPEGQGIRRFLDDLAGLTATEFRVQAGYESDREAARDQAAFLENLNCDVMALAFDKYLSDHKLGWLAGIDAESRPSETPLSNVDELPSSGSLGTPERWEAALYAVCHLIPVSEVGRLLHQLRRWSNGQKATPDGGRLERLFELYLDMHDAKFDGSTPLRDHDDLAVIFETTGIRDRVLPSSLQHGEHERLPLRGLREMLRFGNLRVLAPIFATAKVDQAMIGELEGLEARIGDAPSQVDRAQALRTEMHAALCKKRKLAHDDKKSVKDYLTSLQTVIRHRRLANHVRLTNHVRTNEILMSVMGRLADFSGIWERDLYFVTNALLYQAGLTPCDVFSKEPPKENRRSPLQEFENGQIVFALRKMQAQCDTHAGLVDQIKGETARLFHIAEGAPGNDPRIQNRNWFAHFNALKPKTGDRLDLTADMNRARDLMAYDRKLKNAVVSAIVTLLERENIVIAWTMKDHQLTDAVLAAKSIEHLKQNKIRENLRDERSLGYVAALFGGRVAEEAPDIMHDRTVFHLVGALTEEMEPAE

SEQ ID NO: 49 - protein, 1276 aa, Unknown
  Description of Unknown: cas13a sequence
MRIVRPYGESRTDLGGERGQTRVLVDNTAARARHEIPDFAQSHDALVIAQWISVLDRIATKPQGTQGATRAQHAFRDRLGRAAWAQMCAADRISAAAQADPYVAALWRFKTHPYGDAKYRPRKGKDGKPLGEPKPQGRWYGRFAANAEPEQADVAAIAALMDHHLHVAELRIDPKRPEKRKGLIEARAKSIEGNVLVAEPRKRPVGSWSREAITRYFMRQDVAAEIFAAARDREQGLNDVPRGPVRLALAAKILHGHWTRLFHAPGTRTAYSIREAEEKEPELFALHMAVKDAYAKLLKRRTQPKTLKKGVKPPQQAPVTTVLPKNAGELLRLVQHRSRNRDLSALIRRGKLIHYTAFDIAAAAAEAESKTPDVPDADRLAYVLTHWPDDLSASRYLTSDGQSAIKRSEAFVRVWRHTIAMASLTLRDWASMNNDLGDVLGSANKVDQAIGRANFDPAWHDKKVRLLFGARAALFPSDDDGRKALLASVIRAGLALRNSSFHFTGRGGFLAALKKLGSEEVMVPSILAAAHALWREDATARAGRLRAALTGAHAAHYFEEDQNASILTLLDEAPPKESLPIPRFRRVLGRAENTWKGKEALVLPPTANRRQLEDPARRCRYTILKALYERPFRSWLIARAPEEVNAWIDRAIERTTRAAKDMNAKRGEDDKRSVIAAKAESLPRLSGERGIGDFFFDLSSATASEMRVQRGYGHDGEAAKEQAGYIDDLLCDVVALAFDAWLRNPQANGRPLTFICDLKPETPLPAAPKCTLQEIGSAAEPVRPEDWQAALYLLLHLVPVGEAGRLLHQLAKWTVTSRLADDLLNANVTDDPSKAERTADEEDLKRLVHTLIQHLDMHDAKFEGGDALTGCEPFAALFASRPGFARIFPAEADERLDRRVPKRGLREIMRFGHHGLVASFAEDTRITDKEVGDYLRLEIEERPDNVAALQARKEEAHERWVKAKEKRKTVDPKHLEDYVTALCGIARHRRLASRVTLTDQVQVHRLLMTVLGRLVDFSGMFERDLYFAMLGLLDEKGARPDEVFSGPIDEPKSRLALLANGRVLAALREQIPHSKDLAEELRKDLERLFGMDCSGIRLLEADERGDTCLRDIRNDLSHFNLLHDDSFALDLTTLVNRTRGLMSYDRKLKNAVSKSIKELLAREGLTLSWDMTDRHDLENARIGAKPAVHLGGRKLAFRGGDRRPEPVRENLHSPTHLEAVARLFGGKVVEEDDVTNLDLSSIDWAAEPHNSKETHRHRPAGPRKSPPKRRAYHAPR

SEQ ID NO: 50 - protein, 1225 aa, Unknown
  Description of Unknown: cas13a sequence
MRIIKPYGRTLVEHDGAGERKRVLTLRPDHDSKLDIEAFARDHDELVVAQWVSTIDKIAAKPGPRKGATEEQRAFRDRIGKAAWALLVRNALLPGLADADRADRLAKIWRRKIAPYGDLRPNERPASAKGRWYGAFAGEADVADVDAGEIAAKIHEHLYDAEYRISGDGRKPDGCIAARARSIAVNVLRPADSSACGQPEWSDRDLQAYRVADVAKQIWDAALSRENGRDGAGTKRVTNSVAGGVLFEHWARIFPGPDGKALSIREAIEKEPGLFALHMAVKDCYARILKHHKKKAPGRRERENGDVSPIRKVLPRDMDELFARIISGRGNRDLNALVRLGKVIHYTASDPNADHPESITENWPGDLAGSHYWTSAGQAEIKRNEAFVRVWRHVVVLAARTLTDWGDPHGEIGSDILGKANDATGAKFDEAAFNRKCALLFGKRASHFTAAPDLAFKKAVLKTAIKGMAALRHKSFHFAGRGGFVKALEGIGGLNEIDRFPDVTRALRTLLVEDIEDQSRQVRATMVGAHFGVYLSKGQVEAIYRAVTGAEPGSLPLPRFSRVLRRAKGAWEAEDVLPPPVNRLDLEQRGRLCQYTGLKLLYERPFRRWLEGRSAAKLNGFIYRAVTRASDAARTLNTKESDDWRDIIVARAEKLGKVPDGGDIHGFFFELSAETASEMRVQQAYESDGERARQQAEYIEDLKCDVVGLAYRSFLETEGFDFLRTLDPEAAIAEAHRFDPAELPDPAVDTDAEDWEAVLYFLVHLVPVDEIGRLLHQMRKWDLLAHDRTAPVADGGQARLVDKVQRVFTLYLDLHDAKFEGGEALTGIEPFRKLFEESDGFDTIFPPQQGYEEDRRVPLRGLREIMRFGDLPPLLSIYGRRPATKSNIERYRRAEVADAGGRSEIARLQARREELHAKWVEAKKEGLGPEDRRAYVEALAEIVRHRHLAAHVTLTNHVRLHRLMMAVLGRLADFSGLWERDLYFATLALLHRAGKTPREVFENEGIDLLRNGQIVYALRKLNGSSNASALRSGLFPHFGSAFKRGDPIGGIRNAFAHFNMLRAAQPPNLTECINRARQLMKHDRKLKNAVSKSVIDLLAREGLNIAWAVHTRAGAHDLAEAVLSSRQAQHLGKLRLFPVSGDGRDGKGFFIMEDLHGADFVEMAAELFGGRVSDRWRGKGCVSELRLDSIDWSRQREQKKHGGGKKPTGRARKANRGHKNRHRRA

SEQ ID NO: 51 - protein, 1076 aa, Unknown
  Description of Unknown: cas12f sequence
MSARNIKVKIDTKGNPELRLGLWKTHQVTNEGVKYYTEWLIKLRQQDIYRQSREDASPRVIISASDLKADLLCHARQLQKERLPRITGSDAEILGTLRQVYELIVPSSVGKSGDSKTLARKFLSPLTDPGSAGGRDQSASGRKPTWMKMKSEGNPRWEETFRKWKDRKDNDPTPLVLNQIADYGLLPLIPLFTDVGENIFDPKSKSQFVRTWDRSMFQQAIERLMSWESWNQRVRREWEALNQKHSAFYREQFTADPDAALYRVAQSLEEEMRKEHQGFASDAPEAFRIRRVALKGFDRLLERWQKTLGKNGQSATLLDDIRRVQSDLGDKFGSAPLYQKLLDERWQRLWAVDPTFLQRYAAFNDLTQRLQRAKRVANLTLPDAVAHPIWSRYEGANASSGNRYHIHLPTKGQPGSVTFDRILWPDGNGGWYERKRVTVFLRPSHQVDRIHEAPTDSVVDNFPLVVEDQSARTILRASWGGAKLEYDRNRLPRQLKKGVPDSIYLSLTLNLDTNKPSGLFHTQQNGRVWIRKDVLMQYYNETPGDNVQFKPLYVMSVDLGIRSAAAVSIFSVQLKAGIEEHRLTYPVADCPGLVAVHERSVLLTMPGERREQWDRRYEQQRQGLRELRTDMRGMNDLLRGAYMDGDRREEFLARLSKLEETSPELWGPVYRSLNDSKVASATEWERLVVYCHRQVEQSLSSRIQNLRSGRSAYRMSGGLSLDHVQDLERIRGIIASWTNHPRIPGSVVRWQQGRSHTVALGRHILELKRDRVKKVANYLIMTTLGYAYDSKRARGEKWVRRYPACHLMVFEDLTRYRFRTDRPRSENRQLMRWTHQELIAVTGIQAEPHGISVGTMYAGFSSRFDAVTKAPGVRGATVRQILRTRGMVRLKEIAADVGIDINTLRPHDVLPTGDGEYLLSVVRHGESYRLKQVHADINAAHNLQRRLWTQDEVFRVSCRLALNSGRVVAMPPPSYNKRYGKGFFEKGDNGVYIWKTGGKIKISDTLEEDMDIPEDTAELLRGNSVTLFRDPSGTIAGGNWLEAKEFWGRVNSLVNKGVRDKILGGIPVDNSSAHAE

SEQ ID NO: 52 - protein, 660 aa, Unknown
  Description of Unknown: cas12f sequence
MPMIKITECVTWGTTCDGLWDARPHLEVRRSWSPPVQGGRTNRLDAPPASVTLNIHGRVEHPRDADALSVAPLRVRHMFERTTTKAAFLSPLDLRPTQATDLERFAGTTRWAFNWANALLEAHHQAYEGRRQQAARHLFGLGPEQLDELRVLANGTRDENGKKAKGDPVKRREYESIQKATKKAVSEENKALGAEMKLWDEHRSLVVHKGRPLLTPGDEPALDAPPLAHRLYARRVELAGIQKTDPDYYAEQRKKEREAITPNVVAMKRDLMAKGAYFPSEYDLQYIWRTVRDLPKEEGGSPWWPECPTILFYDGINRARTAWKNWMDSASGARKGPPVGMPRFKSKYKAKDTFTITNPNRSVIKFETYRRIAITGIGSMRLHRGAKLLARRIAAGQAEITSATISRSGTAWYVSVLCTVHTTARTAPSKAQRSRGAVGVDWGVRALATTSKPIALTPGKPASRTVPAEKYGAAMSQKIARAQRQLARMPKGSSRRRKAARHVADLQHLVAQRRASSVHQLSKALAQSFEIVAIEGLNVRGMTKSAKGTVENPGKNIRQKAGLNRAILDATPGELKRQLEYKTKKYGSRLVELDTWYPSSKTCSRCGWVHPKLKLSMRTFRCQQCGLVEDRDFNAAVNIERQGITHIVKENEGTDDREEG

SEQ ID NO: 53 - protein, 696 aa, Unknown
  Description of Unknown: cas12f sequence
MSTPMGWTAVNGGDATSPTTRVSSPPGEPRTGACPRAAAADATRAESSPRRTSSPARPGERHARARTSRYPIPNTYVVDRPSAEGDRHGQSSLDCGPCPVRRSGALHQSSQAAHRRSMTGAKQKTPIRVVRFSIDHSALTPAQVVAFARHAGAARQTWNWALGRWMDWRNNTKFYVDYKVFKAAGMGPGLSTDDLIQVIERAVSIRQDDKWMDAAWDEARQIHGEWDQFQKASTLQSLYLAGAQEPFDPSRDDGINPYHWWVTEGDKSGLPKAERHNVNSGATYTAPLRAFEEAVGRFYKLPGKKGTPKFKSKHDDEQGFCIQRLTETGLSPWRAIEGGHRIKVPSIGSIRVVQSTKRLRQLIKRGGKTTSARFTRRGGKWFVSVSVAFDLSAPRVQRPARLSRRQRAGGSTGVDLGVNRLATLSSGDQFPNRRLLRKSMAEIKRLQRKFDRQHRAGSPECFNEDGTHKKRCRWGREDGPAMSRSAQTTKRQLRRIHDLTARRRAGVLHEITKDLATRFELIGVEDLNVAGMTAKSKPKPDPDRPGHFLPNRRAAKAGLNRAILDVGFYEFKRQLGYKTEWYGSTMQMVHRYAATSKTCSGCGWVKPKLTLAERTFNCTQCGLAMDRDHNAAVNIRALALEGAAPMEREQPAPVGAAEKRHRDPVSHRRRPKSLAPCESTRPVRDLSPPATQEETA

SEQ ID NO: 54 - protein, 606 aa, Unknown
  Description of Unknown: cas12f sequence
MAQAEAPRRLRAYKFALDPTEAQLREFEQHAGSARWAYNHANAILSRYSDTLRNRWNAWIAQHHGLSREQLYALPDRERTAIQAAARAAVKAENAQLAAELRIIDDHRKRVTHKGKPSVEPGEQPAEDAPERAYQLWRERVELARLHAEDPQAYRAERKRILDEIRPLVNATKRKLIEQGAYRPTAMDISTLWREIRDLPPDEGGSPWWPEVSIYAFTSGFAHAETAWKNYLESLAGRRAGRPVGKPRFKKKRRSRRSFTLYGSVKLVTYRRIQVPSIGSVRLHGSAKRLHRALERRGGIIKSITISQGGHRWYASVLVDELDITPGRETQRGPSRRQRDRGAVGVDLGVHHLVALSDPNEKTLDNPRHLRKARKRLLKAQRAMSRRRGPDKRTGQEPSRRWVKARNRVARLHHELAVRRAGHLHEITKRLATSYELVAIEDLNVAGMTRSARGTIDQPGRGVRAKAGLNRSILDTSPAEFRRQLQYKASWYGATVAVIDRWAPTSRTCSSCGAVKAKLSLAERTFFCEHCGMELDRDINAARNILAFAQSAYPGEGKALNACGGSVSPGSQSVVQAGADEAGRPARKPRRSSRGSDPPATPTTRA

SEQ ID NO: 55 - protein, 1421 aa, Unknown
  Description of Unknown: cas12a sequence
MTSSSPTQRAYTLRLKSAAQGDKSWAEKLWDTHEIVNKGARAFGDWLLTLRGGISHKLENLNDKETGEEGKKRRRILLALSWLSVESKDFAPEKYIVEKDGEDKHRTKEALEAILKSRNLEDEEVESWVNDCKDSLTSSIRDDAVWVNRSRAFDDAVRKIGDSLTREEIWDVLGRFFGKKEAYLAPRTIDEKNGKTKKEEPKDLARKAGGWLSKRFGKGKGTDFSKLSKVYSEIVKWAEEPRKSEPRTLANLASALKEDSLQGILNLIKNSGSKSGTRNFLEEIGEGEVSKENLAILKAKAEGNRNYCKKEIGGKGRREWSDRILKSIEETLDGKFTYLQEKGPARHWEFAVMLDHAARRISAGHTWIKLAEARRRNFEEDSQKINEVPENARQWLETYREDRSKSSGAIEGYLISKRAVTEWETVVKAWKNCKTEEDRIAAAGALQDNLGIDQFGDINLFRALASEDVRCVWQVDGKPDANILLNYVAATKAEFDKRRFKVPAYRHPDPLLHPVFCDYGNSRWEIRFDVHEVNRTGKKAKQNKKTIETADVHGLKMDLWTGSKIENVSLRWQSKLLEKDLAVKQLDGKEDGKKEVSRASRLGRAAVGAGWETPVSASSVFAQKHWNGRLQASRKELSRIARRVKTRGWDEKANSMKKNLKWFITFSPKLKLQGPWISYVDNSEDKRPFTFTSKGEPILDEVFSIENKNRKGRARLILSRLPGLRVLSMDLGHRHAAACAVWETLSSRQLEDACAEGGYDKPAPDAMYHHIKSNRGKRVIYRRIGADELSDDSIHPTPWARLERQFLIKLQGEERKARMATADEIWEVHELERALGRKTPLVDRLTKSGWGSDSGTPRQRQLLGELNQWGWEPDEAQENSEDDEITSRESLLVDKLMSRTVDTVRKGLRRHGNRARIANFLVAREKTVPGGQMDTLNNEGRKEIIADALAFWYELANGGEWKDTEALDWWKIHIEPELSVEELPDIAGTGIAPKERKRKKKELKEKLKPVAERLLTSGAKKLSDQWCERWKQDDKEWQKTLRWLRDWILPRGVRGKSELIRNVGGLSLDRLTTIQSLYQAQKAYFTRITPKGIQMDKDKPLTAVMNFGGHILNDLENMREQRVKQLASRIVEAALGVGRVKIPKKSKDPKRHYERVDAPCHAVVIENLTNYRPEETRTRRENRQLMTWCSGKVKKYLSESCSLHGLFLWEVPPSYTSRQDSRTGSPGIRCEEVSVEKFFKTPFRQREVARAEEKDSKNKASAYEQYLIDLKERWKSRGEETALLRIPRKGGEIFVSANSNSPASKGLQADLNAAANIGLKAITDPDWSGSWWYVPCSSKDFVPIKDKIGGSRAFENITTPMPNPDDAKEATGKKRSGKKEIINLWRNPACSPLERDEWERTAKYWNMVEYHVIKRLKRQMG

SEQ ID NO: 56 - protein, 1333 aa, Unknown
  Description of Unknown: cas12a sequence
MKNFQDFTNLYELSKTLRFELKPIWGTKKLIEEKNILKLDKKKRENYEKVKPYFNKIHQEFINFALRNPNFDFSQFEEKYLNWLKDKKNKDLLKEKESIDKIFLEKIWKLFENSVKDFLKENGFESIVKSEDQNLKFFRRKEIFEVLQEKYGSELETQMVNKDWEIKSIFNGWEKWLWYFDKFFNTRDNFYKTDWTSTAIATRIIKDNLKIFLENTIIFEKVKNKKIDFSEVEKNFSVSIDTFFEINNFNNCFLQDWIDFYNKVIWGETLENWEKLKWLNEIINKYRQDTGEKIPYFKKLQKQILSEKDWVFIDKIEDDGGFYEVLKNFYKNAAEKEWFLKNIFENFYTISDKNLEKIYFNKIAFNTISHKFWSALEFERILYEEMKKEKADWIKFEKKENKYKFPDFIQIIFIKRSLENYDSENLFWKERYYKSEENVDWFLEKNNNNIWEQFCKILNFEFLNILKRRIIDEAWEEYEVWFEISKNILWEKLENFELNQENKWIIKDFADYSLALYSFWKYFAVEKWRNWDLNIDISDDFYGWEDWYIEKFYNTGYDEIVKPYNLMRNYISKKPWEDSKKWKINFETSSLLSWWDKNLESNWSYIFQKWNKYYIWIINWSKPAKEVLEKLYSWNGEKIKRFIYDFQKPDNKNTPRMFIRSKKDSFSPAVGKYNLPVEDILEIYDNWLFKTENKDNSNYKESLSKLIDYFKLGFSKHESFKHFNFVWKDSKEYENIADFYRDVEKSCYQITSEFLDFEELKKLTFKKHLYLFQIYNKDFELDESLQKNWYNFRDEWQKNIHTKYFEALFLEENILRKSWAVFKLSWGWEVFFRKESIKAEKEKRKNIEVTKNRRYTEEKYFLHFPIQVNFKNEISWNFNQEINKFLANNPDINVIWIDRWEKHLAYFSVINQKWEILESWSFNKIENYNKNWEKLLFPEREIKEIHKDWSLIDLELVETWRKVDYVDYKLLLEYKERKRLLQRQSWKEVEQIKDLKKWYISALVRKIADLIIKHNAIVIFEDLNFRFKQIRGWIEKSIYQQLEKALIDKLNFLVNKNEINLEKAGSILKAYQLTVPVDSLKEIWKQTWVIFYTEAAYTSKIDPIKWWRPNLYLKKQNAEINKENILKFDNIIFNSKENRFEFTYDLKKFFWKDSKFPAKTVNTVCSCVERFKWNRNLNNNKWGYIHYENLTDWKLANKEQKEDEFSNFKELFEKYFIDINWNILEQIKNLDTKNNEKFFSSFIDLFTLVCQIRNTNQNAKWDENDFILSPVEPFFDSRKSQNFWKSLPKNWDENWAFNIARKGLIILNRISENPEKPDLLIFNADWDNFARNI

SEQ ID NO: 57 - protein, 1175 aa, Unknown
  Description of Unknown: cas13b sequence
MTEQNEKPYNGTYYTLEDKHFWAAFFNLARHNAYITLAHIDRQLAYSKADITNDEDILFFKGQWKNLDNDLERKARLRSLILKHFSFLEGAAYGKKLFESQSSGNKSSKKKELTKKEKEELQANALSLDNLKSILFDFLQKLKDFRNYYSHYRHPESSELPLFDGNMLQRLYNVFDVSVQRVKRDHEHNDKVDPHRHFNHLVRKGKKDKYGNNDNPFFKHHFVDREEKVTEAGLLFFVSLFLEKRDAIWMQKKIRGFKGGTEAYQQMTNEVFCRSRISLPKLKLESLRTDDWMLLDMLNELVRCPKSLYDRLREEDRARFRVPVDILSDEDDTDGTEEDPFKNTLVRHQDRFPYFALRYFDLKKVFTSLRFHIDLGTYHFAIYKKNIGEQPEDRHLTRNLYGFGRIQDFAEEHRPEEWKRLVRDLDYFETGDKPYITQTTPHYHIEKGKIGLRFVPEGQLLWPSPEVGATRTGRSKYAQDKRFTAEAFLSVHELMPMMFYYFLLREKYSEEASAEKVQGRIKRVIEDVYAVYDAFARDEINTRDELDACLADKGIRRGHLPRQMIAILSQEHKDMEEKVRKKLQEMIADTDHRLDMLDRQTDRKIRIGRKNAGLPKSGVIADWLVRDMMRFQPVAKDTSGKPLNNSKANSTEYRMLQRALALFGGEKERLTPYFRQMNLTGGNNPHPFLHETRWESHTNILSFYRSYLKARKAFLQSIGRSDREENHRFLLLKEPKTDRQTLVAGWKSEFHLPRGIFTEAVRDCLIEMGYDEVGSYKEVGFMAKAVPLYFERACKDRVQPFYDYPFNVGNSLKPKKGRFLSKEKRAEEWESGKERFRDLEAWSHSAARRIEDAFVGIEYASWENKKKIEQLLQDLSLWETFESKLKVKADKINIAKLKKEILEAKEHPYHDFKSWQKFERELRLVKNQDIITWMMCRDLMEENKVEGLDTGTLYLKDIRTDVQEQGSLNVLNHVKPMRLPVVVYRADSRGHVHKEEAPLATVYIEERDTKLLKQGNFKSFVKDRRLNGLFSFVDTGALAMEQYPISKLRVEYELAKYQTARVCAFEQTLELEESLLTRYPHLPDESFREMLESWSDPLLDKWPDLQREVRLLIAVRNAFSHNQYPMYDETIFSSIRKYDPSSLDAIEERMGLNIAHRLSEEVKLAKEMVERIIQA

SEQ ID NO: 58 - protein, 1115 aa, Unknown
  Description of Unknown: cas13b sequence
MESIKNSQKSTGKTLQKDPPYFGLYLNMALLNVRKVENHIRKWLGDVALLPEKSGFHSLLTTDNLSSAKWTRFYYKSRKFLPFLEMFDSDKKSYENRRETTECLDTIDRQKISSLLKEVYGKLQDIRNAFSHYHIDDQSVKHTALIISSEMHRFIENAYSFALQKTRARFTGVFVETDFLQAEEKGDNKKFFAIGGNEGIKLKDNALIFLICLFLDREEAFKFLSRATGFKSTKEKGFLAVRETFCALCCRQPHERLLSVNPREALLMDMLNELNRCPDILFEMLDEKDQKSFLPLLGEEEQAHILENSLNDELCEAIDDPFEMIASLSKRVRYKNRFPYLMLRYIEEKNLLPFIRFRIDLGCLELASYPKKMGEENNYERSVTDHAMAFGRLTDFHNEDAVLQQITKGITDEVRFSLYAPRYAIYNNKIGFVRTGGSDKISFPTLKKKGGEGHCVAYTLQNTKSFGFISIYDLRKILLLSFLDKDKAKNIVSGLLEQCEKHWKDLSENLFDAIRTELQKEFPVPLIRYTLPRSKGGKLVSSKLADKQEKYESEFERRKEKLTEILSEKDFDLSQIPRRMIDEWLNVLPTSREKKLKGYVETLKLDCRERLRVFEKREKGEHPVPPRIGEMATDLAKDIIRMVIDQGVKQRITSAYYSEIQRCLAQYAGDDNRRHLDSIIRELRLKDTKNGHPFLGKVLRPGLGHTEKLYQRYFEEKKEWLEATFYPAASPKRVPRFVNPPTGKQKELPLIIRNLMKERPEWRDWKQRKNSHPIDLPSQLFENEICRLLKDKIGKEPSGKLKWNEMFKLYWDKEFPNGMQRFYRCKRRVEVFDKVVEYEYSEEGGNYKKYYEALIDEVVRQKISSSKEKSKLQVEDLTLSVRRVFKRAINEKEYQLRLLCEDDRLLFMAVRDLYDWKEAQLDLDKIDNMLGEPVSVSQVIQLEGGQPDAVIKAECKLKDVSKLMRYCYDGRVKGLMPYFANHEATQEQVEMELRHYEDHRRRVFNWVFALEKSVLKNEKLRRFYEESQGGCEHRRCIDALRKASLVSEEEYEFLVHIRNKSAHNQFPDLEIGKLPPNVTSGFCECIWSKYKAIICRIIPFIDPERRFFGKLLEQK

SEQ ID NO: 59 - protein, 1115 aa, Unknown
  Description of Unknown: cas13b sequence
MESIKNSQKSTGKTLQKDPPYFGLYLNMALLNVRKVENHIRKWLGDVALLPEKSGFHSLLTTDNLSSAKWTRFYYKSRKFLPFLEMFDSDKKSYENRRETAECLDTIDRQKISSLLKEVYGKLQDIRNAFSHYHIDDQSVKHTALIISSEMHRFIENAYSFALQKTRARFTGVFVETDFLQAEEKGDNKKFFAIGGNEGIKLKDNALIFLICLFLDREEAFKFLSRATGFKSTKEKGFLAVRETFCALCCRQPHERLLSVNPREALLMDMLNELNRCPDILFEMLDEKDQKSFLPLLGEEEQAHILENSLNDELCEAIDDPFEMIASLSKRVRYKNRFPYLMLRYIEEKNLLPFIRFRIDLGCLELASYPKKMGEENNYERSVTDHAMAFGRLTDFHNEDAVLQQITKGITDEVRFSLYAPRYAIYNNKIGFVRTSGSDKISFPTLKKKGGEGHCVAYTLQNTKSFGFISIYDLRKILLLSFLDKDKAKNIVSGLLEQCEKHWKDLSENLFDAIRTELQKEFPVPLIRYTLPRSKGGKLVSSKLADKQEKYESEFERRKEKLTEILSEKDFDLSQIPRRMIDEWLNVLPTSREKKLKGYVETLKLDCRERLRVFEKREKGEHPLPPRIGEMATDLAKDIIRMVIDQGVKQRITSAYYSEIQRCLAQYAGDDNRRHLDSIIRELRLKDTKNGHPFLGKVLRPGLGHTEKLYQRYFEEKKEWLEATFYPAASPKRVPRFVNPPTGKQKELPLIIRNLMKERPEWRDWKQRKNSHPIDLPSQLFENEICRLLKDKIGKEPSGKLKWNEMFKLYWDKEFPNGMQRFYRCKRRVEVFDKVVEYEYSEEGGNYKKYYEALIDEVVRQKISSSKEKSKLQVEDLTLSVRRVFKRAINEKEYQLRLLCEDDRLLFMAVRDLYDWKEAQLDLDKIDNMLGEPVSVSQVIQLEGGQPDAVIKAECKLKDVSKLMRYCYDGRVKGLMPYFANHEATQEQVEMELRHYEDHRRRVFNWVFALEKSVLKNEKLRRFYEESQGGCEHRRCIDALRKASLVSEEEYEFLVHIRNKSAHNQFPDLEIGKLPPNVTSGFCECIWSKYKAIICRIIPFIDPERRFFGKLLEQK

SEQ ID NO: 60 - protein, 1008 aa, Unknown
  Description of Unknown: cas13b sequence
MDTPNFSERIPVSLQSHPYYFAHYLNMARHNAYVILEYVNRELIKPGKNLDEDNLIQSTVLKDGYFDRKPDELSHRNRLLVQHFPFLREAENEGARTCNPVSYKLKTALAALNQWRNNASHYPLNQNHEKDFDLQPFFSFAIEACKKRMREVFQPDDFYLLETNEKQFYTLHNENGFTEKGLYCFICFFLEKKYAFQFLAGIKGFKNTTDNKFRATLETFTEHCCRLPKPKLDSSDIKLDMLGELSRCPAPLFDLLDIEERKKFIREPEEVKPDESGDREEVQQVLMKRYDDRFPYFALRYFEEKNLLKGISFHIHIGRWIKSEHTKKIMGAERDRRLLKDIRTFGELKEFSPEHAPDYWLRDGITPDDVDQFSPQYRIVGNRIGIKLNYNGHNRWSVPDKEINVKPDAIISTYEFLNLFLYEHLYQKKLTGLSPAEFIQDYLDRFNNFLSEFKAGHIRPVGDFSLEKRRGQGDEPDLTARRKSLQKELDRFVLKGKDLPDKIREYLLGYKQKSEKKQAKWILGGMIKETVYWRNKAEQSPEKMRSGDMAQQLARDIIFLTPPHTVKEHKQKLNSLEYDVLQYALAYFSSNREKLYSFFKEHQLTVKGDRAHPFLYKIRLDECQGILDFFIVYMQQKEKWLGWLDRNLKSPRLNEEEFFNTYSYFIKTDTKRAIEMDYESCPNYLPRGIFNEPIAKALQKAGVKIKDEDNASYALSVYSNGKTQPFYNKERYYNKGIFRMEELPEKLQPKELLGKIQWTIKSSGKDTEEFRSLQNLKNRILNTEKEIRYVQSTDRALWIMVADLFPETFELRPDDLECIGHDLSDDLLSRPYQMKEKVYNYTITDYLPIKRYGEFRRFLKDRRLENLLTYFEEGVPLHREALVAELEAYDLQRKNLLEIIYRFEKLVFDRHRHELTFSGEGENQYVNHWDYLDFVARKYGLSAEVKELNSERFTELRNKMLHNQIPYQLWIKEAIAAREENTVCGRIMGMIGEIYERMTTEIEKQMQV

SEQ ID NO: 61 - protein, 1063 aa, Unknown
  Description of Unknown: cas13b sequence
MFDNEQKNLEKEPYWGVFLNQARLNAYIALRDISERLEENAADEDSLSEWPVLKYLDNDTDAVKSRRIFDLVEKHFSMLKIIYGGEKEGDLVKRSKEYKIILKCLFRALNFYRNKFCHMYSGNRARKYNEKELIKYLEDCFDASVRKIKELRRLDEKDVLHLRRKIAEGKDANKRVIDNPQFRYPFKNEKGELNEKGLYFLASIFLDKKEAHEFLKKQEYFKNDSEPKYRATLESFYHYRIKLPRPVIESDVDKNGLALDMLNELKKCPKELFDLLSKEQQEKFRVVDSEDADEEGNEILMRRYSDRFPYLALRYCDENQVFERIRFQIDLGRYYFKFYPKETIDGKTQQRSLDKRLKIFGRIKDVKSKVEQEWSGIIKSPDTIEENPNEPYKLKTTPRYNIVDNQIGFVITGDKNLPDVKRPDGRIELEKPDGWLSIYELPGMLFHGLKYGFDKTERMIKIYIEKQRKICKEICEKGTITPDDGESMPEALKGGAKAAKRNYSEKKLERMLQDTEQRIRAIQTTQKRMDEPGNKPGKKKFFDIRAGKLADFLARDIMALQRFDPAKHGKDKLTAINFQVLQATLAFYGAKKDVIEDMFKGIGLLEGDNPHPFLNQIDPAQYNSIAGFYQAYLQKKRSYLEDYRKEEEYDEQFLRPKRQRYAQEKREIKTVARQLLDNPVNVPKNFFKKEIEEFVFSQDPSLKKSKMNTAYMIQALFEKHYGRQQPFYSYNRTYPVVSKAIEYGKKGKNKKIAKVLMAIEPKLNYMEIKKIVNEMPDGQYEPENLKRNLYEGYKDYEKDERIIRRCKVQDVVSFMMVEETLKDQLDFNGNVLTLEKITPWEASPFKKPVLCHTIISIPFNTKGGHTDKDYVDFIKNNFEGSYDCEPNKIILKYKVTSKDTKLKDIGKYRMYSHDRRLPGLLIWKYRPNDQNGNEIKFTEIEQEIKAFERRRIEIAQCLYTLEKKVIDSWFTQDELGEEHIPFNKVIDVIKAKMPNFEDKCNVLLKIRNAINHNQFPVYEQAIQTAPGKEIAGKMLRITESYIEQIMAKIDPDFGRTEDAESSR

SEQ ID NO: 62 - protein, 1009 aa, Unknown
  Description of Unknown: cas13b sequence
  MOD_RES (375)..(375): Any amino acid
MDTPNFSERIPVSLQSHPYYFAHYLNMARHNAYVILEYVNRELIKPGKNLDEDNLIQSTVLKDGYFDRKPDELSHRNRLLVQHFPFLREAENEGARTCNPVSYKLKTALAALNQWRNNASHYPLNQNHEKDFDLQPFFSFAIEACKKRMREVFQPDDFYLLETNEKQFYTLHNENGFTEKGLYCFICFFLEKKYAFQFLAGIKGFKNTTDNKFRATLETFTEHCCRLPKPKLDSSDIKLDMLGELSRCPAPLFDLLDIEERKKFIREPEEVKPDESGDREEVQQVLMKRYDDRFPYFALRYFEEKNLLKGISFHIHIGRWIKSEHTKKIMGAERDRRLLKDIRTFGELKEFSPEHAPDYWLRDGITPDDVDQFSXPQYRIVGNRIGIKLNYNGHNRWSVPDKEINVKPDAIISTYEFLNLFLYEHLYQKKLTGLSPAEFIQDYLDRFNNFLSEFKAGHIRPVGDFSLEKRRGQGDEPDLTARRKSLQKELDRFVLKGKDLPDKIREYLLGYKQKSEKKQAKWILGGMIKETVYWRNKAEQSPEKMRSGDMAQQLARDIIFLTPPHTVKEHKQKLNSLEYDVLQYALAYFSSNREKLYSFFKEHQLTVKGDRAHPFLYKIRLDECQGILDFFIVYMQQKEKWLGWLDRNLKSPRLNEEEFFNTYSYFIKTDTKRAIEMDYESCPNYLPRGIFNEPIAKAVQKAGVKIKDEDNASYALSVYSNGKTQPFYNKERYYNKGIFRMEELPEKLQPKELLGKIQWTIKSSGKDTEEFRSLQNLKNRILNTEKEIRYVQSTDRALWIMVADLFPETFELRPDDLECIGHDLSDDLLSRPYQMKEKVYNYTITDYLPIKRYGEFRRFLKDRRLENLLTYFEEGVPLHREALVAELEAYDLQRKNLLEIIYRFEKLVFDRHRHELTFSGEGENQYVNHWDYLDFVARKYGLSAEVKELNSERFTELRNKMLHNQIPYQLWIKEAIAAREENTVCGRIMGMIGEIYERMTTEIEKQMQV

SEQ ID NO: 63 - protein, 1160 aa, Unknown
  Description of Unknown: cas13b sequence
MKTLGALSSHNYNNKKYYFSGLLNTAQYNFNLALQEVNDRLGKKGKNPGKTMIKNIFDQKDSFSTQERAMYYLEEFFPWIFLVMKQSGINIPTEEQETKLHKEEIQLIQEHLISLYELLDDLRNEQTHYMHDPVIIPEEVSKMLDALLLQILKNTRKKCKDDEYRTFIVKKYQEEFQKEIKVQVKDRFGKEKEKIVTGEVKENYVINRCFRKWIQKEGEEETLRYSTVQEEQGKYVWSSSGFVFFLSLFLRRKELEDVMNHVPYFKDSRKLLFYLTRKTFSSYCFRDLRKSLRSDYSNDSLLMQMIEELYKCPGELYEVLLKEQKQEFIEDINEYYKDNPEFEGSANEAQVIHPVIRKRYQDKFPYFALRFIDEYFNFPTLRFQLVLGEYVTDRRTKELQGTALFTDRVISQRISYVGKLSEAEMNKKREGYTETGWKEYPNPYYKIENNRIPLYIEFSKNEELIFKEKKFKYNTLAKWENREIDKRTGEFNQVNKQRRITQLEEFKIDNPKKMKTPNVFLSIYELPALLHALLIEKKTEAEIEDIIKAKIKKQLTEIAEGRRNLSGLPKGIKKMRNCNSDFEKKKLISDIDNEIKKGEKILEEVQQWLNPVINKKGTGKQENNKPFFSNTYRGKYATWLAYDIKRFTGKDHIQNWKGYQFSELQTLLSLYTLRKEELKNFLEKDLQLTSHPFLKEALKAVNLEDFMGAYLRGRQFFLEKAKKQIGIKGVKKSIFQYFEERKYKIYSSNLDYWEELWKHPVNLDRGLFDERGTVYNKNKELNDLQNRAAWFSFAETNPKQQFYHFPRIYSDEDITKPVTDRYGKTKEKLILFKLSPQKGFMEQIPSDLKKKYQEDKGKVEHPEVQKEKKYEEKKHPGINAFIKNAYKNEQKIRRISRNDIFLYEMVKYMLNKISPATEFSSLDKVWLTRIEREKQATEAREQSFKEKGDTSENKIRQDYLLSFPITLTLFNDIIKEKVKIKDIGRFRKLEKDERVQTMISYYTSGLWKNDQPSLTIKELEAELESYHKIRLQEIFKEVHKLEKEIYEFTPEEDKSKLLARESFPKFKYYISFYFIPKEDQEVFNEIQFDKYKNLEQIPGRKPEYDPYYLLIFIRNKFAHNQLPAEPIYKTALTFLPNNFNTLAEYYHKLFILLNNKNYNN

SEQ ID NO: 64 - protein, 1160 aa, Unknown
  Description of Unknown: cas13b sequence
MNILPAAPEKEKIAYSTATAPWFFGAFLNQARHNLFLTVNDLAIRLGEKVIDYDDQLLNSNVVRMLVNEKASPLQLEILMKYLDRHLPFLIPMQVALKGHQGDASDNPVIGSPADYGAILSKLIVCLNAARNHFSHYHSTSGWSGYNEVIEWMEHVFTRNIETVVKRFTLTEEEVQHLKKPVDKSPKGTIPPYYFSFCKGDIWTDTGLAFFICLFLTREEAYLFLKKLRGFKRGEERFHKATLEAFCVGSLKVPRERLESNNSPQSAFLDMCNELVRCPKSLFDLLEPEKQELFRRDPEPEDAEDNGIEEEEDQPQALLVRKENRFSYFALRYLDIAKAFPRLRFGVDLGTYFFSVYPKTFAGIEETRQLSKRLIGYGKLEEFAREKRPEHIAALFRSKEEANAAPTEPFIRETAPHYHLDGNNVYLYMSGDGEAQWPAVELEEVTGKSYPRKLVKKSTLLPFAVLTVNELPALLFYHLLHKEKGAGDAAERVIINHMERVKRFFKALQDDKVDQVAGQPIRKPDVDADESLHMEYDRRWKLLKKKLSEYQLRASYIPEKIINYLLNIEAVDLGDKAMAQLKNLQRQAQDDIAAIERRMEHLMKKGADGRKTLKVGNLAQQLAEDMLQMQPVQIGTDGEPVPASKANNLAFRLLQSHLAYFAENRHNLPAVFEACGLIGASNKHPFLDNINIESCKGVVDFFILNFRNKLDFLDRCLQEGEWHRYHFISAAKLKSGAKVTIKKYLNEAFESKGRNHIPFTLPPSLFLDASLDWLAKFGDGKAKKVLAENEYVNSVFLIRRLFADGGLQPFYAWKREYRLFEKKAGKAVFLDEAGRMRKADKIGIEVERHREFLARPVKKGKQYDIKKAAAEQFLRSYRFYLQEEKYIRLLAAQDMLLFRCICDLLTYHVGDIGLEELAEAKAGTFSLANITPEKTETAKSLLNYRPAGGVVLDRHFYATDEKGAFVKQEGKLVPGGQVRIFDNTLKIKNAGNFRKLLKDRRMNNLFFYFKQHADEPVVLHRMVLENELRAYDRMRLKVLPVIAEFEKKLYQHCTDVEKERLVVNGSMHHRCYLDVYREKYQPDWGWEAAGNLLRIRNAFVHNQFPLMEGDGFKLEVAHWKKINADFVPSEQGSSLGYGIIDRLGQLAVEGYEGLIKNIHV

SEQ ID NO: 65 - protein, 817 aa, Unknown
  Description of Unknown: cas13b sequence
MGEEEQAHILENSLNDELCEAIDDPFEMIASLSKRARYKDRFPYLMLRYIEEKNLLPFIRFRIDLGCLELASYPKKMGEENNYERSVTDHAMAFGRLTDFHNEDEVLQQITKGITDEVRFSLYAPRYAIYNNKIGFVWTSRSKKKSFPTLKKKEGEGHRVAYTLQNEESFGFISIYDLRKILLLSFLDEGKNIVSGLFKQSKANWENLSENLFDAIRTELQKEFPVPLIRYTLPRSKGGKFVDPKLADKQEKYESEFERRKEKLSEILSEKGFDLSQIPRRMIDEWLNVLPTSKEKKLKGYVETLKLDCRERLRVFEKREKGEHPVPPRIGEMATDLAKDIIRMVIDQGMKQRITSAYYSEIQRCLAQYAGDDNRRHLDSIIRELGLKDRKKGHPFLGKVLRPDLDHTEKLYQRYFKEKKEWLEATFYPAANPKRVPRFVNPPAEKQKELPLIIHNLMKERPEWRDWKQRKNSHPIDLPSQLFENEICRLLKDKIGKESSGKLKWNEMFKLYWDKEFPNGMQRFYRCKRRVEVFDKVVEYEYSEEGGNYKKYYEALINEVVRQKISSSKENSKLQVEDLTLSVRRAFKRAINEKEYQLRLVCEDDRLLFMAVRDLYDWKEVQLDLNKIDNMLGEPVSVSQVIQLENGQPDAVIKAECKLKDVSKLMRYCYDGRVKGLMPYFANHEATQEQVEVELRHYEDHRRRVFDWVFALEKSVLKNEKLRRLYEKSQEGCEHRRCIDALRKATLVSEEEYKFLVHIRNKSAHNQFPDLEFGKLTPNVTSGFCECIWSKYKAIICRIIPFIDPERRFFGKLLEQK

SEQ ID NO: 66 - protein, 1114 aa, Unknown
  Description of Unknown: cas13b sequence
MRIPKLIEEHKSVFGAYSTMALSNVETVLNHIAERAGLDGYERDRGPGVEDYWEHPVMQCLCRKDKPRSIPSDVLLDVRNRLFRSFPFLKIMAENQRDYRNAKGKVECVEINESDIFVVLNNSFRVLKAYRDTCTHYLIENRIWEDNSPMLMYNECPLAAMVNQYYTAALRVTKERYGYETRDLTFIQKRRFKQEPEKEASGNVKKKAVPDLAFFLSLVALNGDGRKWLHLSGWGVVLLICLFLEKKYVNVFLSKLPNPGNYPPSSKERRIIRRSMGVCSVVLPKERIHSETGDLSVALDMLNELKRCPRELFDTLSPGDQERFRTISSDHNEVLQMRSKDRFAQLVLQYIDHNRLFENLRFHVNMGKLRYLFNPKKYCIDGQTRVRVLEHPLNGFGRLQEMEEKRLQENGPFARSGIKVRCFDEVRRDDANESNYPYIVDTYTHYVLENDMVEMFFCPEGSGMKMPEVTSREGKWYVDKKVPHCRMRMSVLELPAMLFHLLLCGAKNTEVHIGKVCDNYCHLFSDMAQGNLTEENILSYGIKKEDIPQKVWDCVRGVHMGKDSRAYREKEIRERYEDVTRRLERLEADRKAVLGGENKIGKRGFVQIVPGRLAAYLATDICRLQPSLRKGDGYGTDRLTGLNFRLLQSSIATYNCGESDILYGRFRDVFCSAGLIGGDNPHPFLDKVLPEAYSVCCPRNTIEFYERYLEEYQRYLKPLVIKLEKGKVPSLSFVNEGQRRWARRDDAYYHELGNLYLSQAIELPRQMFDDEIKDKLREMPEMRDVDFDHANVTFLIGEYLKRVRHDESQEFYSWPRHYKYVDMLKCILNPKNGSLQAVYIQMGEREGLWQERSELEEKYAKIRLRDLGRKGLDKDEANERIKTGLGNRKKEYQKAEKVIRRYKVQDALLFMLAKNTLFNSVEVDDERFKLKDIMPDGEKGILSEVVPMDFCFRSGNSATRKLMGTIHSDNTKIKNYGDFFALANDKRMVTLLPLVGEQCLVKEEVKEEFDKYDDCRPEMISMVFDFEQWAYSAYPELKELVSNEAIKGRLFSNLLQELLGRGELTYEEKYALVGIRNAFLHNSYPKDGGVVKVRTLPDIAKSLKDVFKEYIRLE

SEQ ID NO: 67 - protein, 909 aa, Unknown
  Description of Unknown: cas13b sequence
MKMFYKSVLTAFFTAVDSLRNKYTHYSHKDLNIREIKIECTLGGKDYCIGLLNALDCIYDSAVNLLKLRFMAGEDEVAHLRRCKAVNKKVVVRTEKDGFYYRLSDNGGVTEKGVIFIASMFLNRKYGFLFLKQLEGFKRSDEKRYRLTLEAFLAFSNIKPVDRLKSDKLDRASLGLDMLNELTKIPKELSETLSVDCLYKYLASDGEDDLRSRIRYQDRFVPLALEFISQSDEFKDFRFYTYVGNYVYKGYIKRLIDGTDKERYLSDRLCGFYKSVNDASSDAIAQKYGVEIKDSNEPDYMLPDSFRPHVLRATPHFVINTNNIGIKICGNDCLPIVNGKGVESPEPDYWLSIYELPAMLFYAYLREKNGKRFKDYKSIRELIEGVEKKADEKNDRDKGALMARHIDKEIIWTQTKLDEVKRLEEKKVAAYGKKGRVVLKAGRMADLLAHDMVRLQPATKGSDKITGANFQALQVSLAYFKRDILADVFSRAMLTTGNHRHPFLYRIDVSHCSSLRDFYVAYLGERRKYFEDVAKKIAKNKLNTPCHILRRLQREGSGEEAGKDVKPKFLPRGIFTDSIKNCLEQSKLNIYIRNARNDVKPAINAAYLILMYYKEIEKGEFQGFYGEKRRYDILEEGKPLDLAERKKALASIKPAKIDVSEANMPMSKEEHLMRKRYHAVCNNESAIRMYQVQDILLLLMAKDIFKKALSEGVMSKKIGLENLNGIFDAPVNFVKNFDNIKLTATGIKIKDYGKVCRLGTDFKFNSLIKAFHKVYSKSVEMDYSDYLKEEEEFEKYRLNMVKLCREVERGITEDLHLSLDGKSHLSFNDDVIKPYNDKYNVFNGGDLTFFINARNMFMHGDYKYECVKYVVSEHFKGSLNDVSFAKETYGHFCNLLESMRKKTGLRIDI

SEQ ID NO: 68 - protein, 821 aa, Unknown
  Description of Unknown: cas12g sequence
MLPTRYKPARTLVRPLGRLPHEPRKEFVEKCRRVRMHFEQFNIDVADLCQWLMSLRPNTRIGDAQSTVFWDFFLNPSILTVEADEKERDRWRLAAFDELLQIRFGHDPNAPPWSEEFRSAIRHVAQRPKSATAQRLFDRLRSLTAPHRLVLLKSAAEWIIARYQRGMENWQRQFAEWQREKEEWEAAHPNLTPEVRDAFTRVFKNLFENPDGDGKIGVRRKNPRICSWERLKLNKDNCVYAGQKGHGPLCWEFSKFVKAQKNAGTIKTFFVDVANKYLHVRRNLSKPGVKLKKSPRQEAFKRLYNQKGMEKARNWFTDAWSGYLTALNLNEKTILDHGCLKHCGAIGAEFEKSLCQFNPHTHLCVQYRNALESLEPAIRELEGDYREWRRLFLAPPRKPSFRYPSSRRLPMPKIFGEHFHQIDFDQSILRLRLEDMAEGEWIEFGFKPWPKDYRPGKDEVRVTSVHVNFHGNRMRAGFHFEAPAKPSRFACTQDELDDLRSKQFPRQSQDRQLLEVARRRLLESFDGMLESDLRILAVDLGEKGAAAAVYQGHGHEADVAIPIVKIDRLYDHVPDVLDVESARVPPPKFDDSRDPRGVRKEHVGRHLGQLQRGAQTLAQHRQQDESAPAALRRHDFRSLTRHIRWMIRDWTRHNAAQITAAAETHRCHLIVFESLRGFKPRGYDQMDFAQKARLAFFAYGRVRRKVVEKAVERGLRVVTVPYGFTSQICSECGHRQRNKGRLRKNKYQRRFVCECGEPKKSANKTAAPDRSATVSPCTCRLQLGSDVNAARVLARVFWDEIVLPTREEMREPAVDSAPPSK

SEQ ID NO: 69 - protein, 797 aa, Unknown
  Description of Unknown: cas12g sequence
MCLCTLSGRTRQEEEIIGSTQYTEARSLVRRIRRPRGESRRQFKSNVLLLRRHFEQFNVDASEICQWLMGIRPGGRHADESTGPFWEFFLDPGRFLRETGRGPEDADERIDAYRRIAFDVVAGIEDESRMSDPSIPRQIVESLHAVSMATRTESARRLFERLAGLEPSHRQILLKAAAEWIVSRYWRSVQGWPDRYKHWSDEKEEWEKAHPRLTESLREEFTGIFRDLGIRRKKPRVCPWERLEKGMDNCMYAGERIKVGYSRQSHSQLCAKYERFSYKQRQRTKSGKNFKSYFVKNAELYLKLRRKNRSLIKKDVMKLFRKKVPQALWFEKAWDEYLKALGVDEATLTKDGKLPHCTQFADDKECLFNRHTELCLQYRERLLRLPHLQELEQLYREWRDKYLSGPRRPSLRYPSKRTLPMPKVFGRGYFCADFTNSLLDLRLEGMGEGDFVRFGFAPWPADYDAQPSDATVTSVHIHFVGTRARAGFRFQAPHKTSRFASSQDEIDDLRSRKFPRAAQDGEFLDAARKLLLESFTGDAEREMKLLAVDLGDRGAGAAVFEGRCFKEAMPLKIIKTDTLIDKPPPVTKTPRKGKPGKRESKRARGLDKYHVARHLDTWRKGARKIAERRAKGEADPVKLGAHDMRSLSLHVRWMIRDWVRLNASQIIKTAESHKTDLIVLESLRGFSAPGYHKLDDEKKRTLAFFAYGRIRRKLTEKAVERGMRVVVAPYLRSSQVCAECGREQIDRNKLMKDKRKRRFICEYSDCTWQCDSDQNAACVLGRVFWGEIELPSERKKD

SEQ ID NO: 70 - protein, 830 aa, Unknown
  Description of Unknown: cas12g sequence
MHPSRYKTARTLVRRLCRLPGEDRSAFRSKVGLLRGHFEQFNVDVSELCQWLMSLRKRNKVPENPATFGALGDFLLQPGLPGEETDEKEADRLRLAVFDAVAGFRMLEDRLAASIPASLSDAIRDEAVFLAGVRAAGKPSGLARVLARLEACAPAQRLVLLKSAAEWIVARFLRGTENWMRQRAEWEKEKAAWEAAHPHLTPEVRAQFNKIFESLHDPENSGKPGVSRKNPRICPWDRLKQNLDNCCYGEKGHSALCWRYQDFLKQRMGENRRDKKNFSATAMDLAQICREWKIQHSRNALNNPRVLDRLFAEHERRKQDKTKKESRSPKPRQGGYKANPKADYLRSFKAHWKAYLEHMKLNDTTVLERGCLPHCLSIKKNGKESTCKWNKHTELCLEYKRSLAPLPDSVLELEPEYREWRRLYLHGPGRPHFRYPSAGELPLPKVFGEGFHQVDLDRSIVRLRLEGAAEGEWLEFGFIPWPRGYQPSRREVLITSVQVHFVGTRPRAGFRFDVSHRTSRFGCSQDELDELRSRRYPRQAQDKEFLAAARAQLIQTFEGGEGAARQQMRVMSVDLGEGGACASIYEGRTHQKDESLKVIKIDRRYDQHPEVLEKDVGAAKPQKFEKSDPRGVRKEHVARHLNRIAAGASAIAEHRRKERSDAECSVGELQEHDFRSLKRHIAWMIRDWVRLNAAQIIDVAKQHCCDLIVFESQRGFRLPGYDELDRGKKQRFAILAFGRIRRKVVEKAVEHGMRVVTVPYFASSQVCSACKRVQENRGSWRENKKKRVFACEFCKLKLNSDANASRVLARVFWGEIELPEPTRAHLPSKA

SEQ ID NO: 71 - protein, 864 aa, Unknown
  Description of Unknown: cas12g sequence
MPVSRYSESRTLVRPLARLPHEERQDVTPKVARLRRHFERFNVDVAELCQWLMGLRNQFGPKESPASFGPLGDFLIEPALDNIDADETERDRWRLAVFDAVAGFRPIRGLGDHPVPDTLRLAMQQAASLSPTPTTARLLERLRPLSPAHRLVLLKSAAEWIVARYQRGMENWVIQHAAWHKEKEAWEREHPALTPAVRERFTALYKQLSDSKPTDRPVSRRKNPRICEWERLRQNIDNCCYAGEKGHGPLCRKYANFVKARKAVDGKFNDLLFWDTATSFIALCRKFNVTRARNALQSQLDALFAEDQRRKAERDQAKGRQPRPLHPQAAARAKSDFLRIFKDGWNAYLSAMGLNDSTAIEKGRLPHCQKIGGTFENSKCEWNPHTDLCHQYRRLAGQLDDATLALEKDYREWRRLYLAGPRKPSFQYPSSRDLPMPKIFGAGFFELDMDRSILRLRLDDMVEGEWLEFGFKPWPREYTPSRAQVARPGRITSVHVNFIGSRCRVGFRFEAPHAGSRFGCSQDEIDQLRRDHPRERDDQPFLEAARKRLVETFAGDARRDLRLLAVDVGEKGCCAAVYQGTRYVADALLPIIKINQLYTEPPTELKPDSHNRPAPDRRPFNDEKDPRDPRGVRKEHVARHLKRMADKAPEVAAYRLAQREKAAPSPSASPPPVTLGVHDFRRLKRHVTWMIRDWARHNAARIVAEAQRHGCDLIVFESHRGRRPPGYHEVGDDAERRKLDNATFAFGRIRRKVTEKAVERGLRVVTVPYHCSSKVCSRCGRLQENDGLLRRNKKERKFICEQCKFETNSDGNAARVLARVFWGEIMLPSPEERRKKREGSGGRSPTPANPGGLVDAPPSRRNLR

SEQ ID NO: 72 - protein, 1263 aa, Unknown
  Description of Unknown: Cas12 sequence
MEDYSGFVNIYSIQKTLRFELKPVGKTLEHIEKKGFLKKDKIRAEDYKAVKKIIDKYHRAYIEEVFDSVLHQKKKKDKTRFSTQFIKEIKEFSELYYKTEKNIPDKERLEALSEKLRKMLVGAFKGEFSEEVAEKYKNLFSKELIRNEIEKFCETDEERKQVSNFKSFTTYFTGFHSNRQNIYSDEKKSTAIGYRIIHQNLPKFLDNLKIIESIQRRFKDFPWSDLKKNLKKIDKNIKLTEYFSIDGFVNVLNQKGIDAYNTILGGKSEESGEKIQGLNEYINLYRQKNNIDRKNLPNVKILFKQILGDRETKSFIPEAFPDDQSVLNSITEFAKYLKLDKKKKSIIAELKKFLSSFNRYELDGIYLANDNSLASISTFLFDDWSFIKKSVSFKYDESVGDPKKKIKSPLKYEKEKEKWLKQKYYTISFLNDAIESYSKSQDEKRVKIRLEAYFAEFKSKDDAKKQFDLLERIEEAYAIVEPLLGAEYPRDRNLKADKKEVGKIKDFLDSIKSLQFFLKPLLSAEIFDEKDLGFYNQLEGYYEEIDSIGHLYNKVRNYLTGKIYSKEKFKLNFENSTLLKGWDENREVANLCVIFREDQKYYLGVMDKENNTILSDIPKVKPNELFYEKMVYKLIPTPHMQLPRIIFSSDNLSIYNPSKSILKIREAKSFKEGKNFKLKDCHKFIDFYKESISKNEDWSRFDFKFSKTSSYENISEFYREVERQGYNLDFKKVSKFYIDSLVEDGKLYLFQIYNKDFSIFSKGKPNLHTIYFRSLFSKENLKDVCLKLNGEAEMFFRKKSINYDEKKKREGHHPELFEKLKYPILKDKRYSEDKFQFHLPISLNFKSKERLNFNLKVNEFLKRNKDINIIGIDRGERNLLYLVMINQKGEILKQTLLDSMQSGKGRPEINYKEKLQEKEIERDKARKSWGTVENIKELKEGYLSIVIHQISKLMVENNAIVVLEDLNIGFKRGRQKVERQVYQKFEKMLIDKLNFLVFKENKPTEPGGVLKAYQLTDEFQSFEKLSKQTGFLFYVPSWNTSKIDPRTGFIDFLHPAYENIEKAKQWINKFDSIRFNSKMDWFEFTADTRKFSENLMLGKNRVWVICTTNVERYFTSKTANSSIQYNSIQITEKLKELFVDIPFSNGQDLKPEILRKNDAVFFKSLLFYIKTTLSLRQNNGKKGEEEKDFILSPVVDSKGRFFNSLEASDDEPKDADANGAYHIALKGLMNLLVLNETKEENLSRPKWKIKNKDWLEFVWERNR

SEQ ID NO: 73 - protein, 1222 aa, Unknown
  Description of Unknown: Cas12 sequence
MKKFTNLYSLSKTLRFELIPQGKTLENIQKSGILEQDNSRAEKYEKIKKIIDDYHKFFIEKSFTGKKIDDYFLNQYFELFKIKDKDEEQKKDFKSIQENLRKNIISFFDKNKLKRLFEKEIIKEDLPNFVKEEEDKKLISEFDKFTTYFVGFHENRKSMYSEEEKSTSIAYRTINENLPKFINNIFVFEKISKTPISENFRELYKDLEEYLNVNDIQDIFKLNYFSNVITQKQIDVYNLVIGGKTLENGTKIKGLNEYINLYNQNQTDKKNKLPLLTVLFKQILCDRDTISFLPEQFENDIDVLDNIKNTYSNMEKSIKDIKDLLSNLKDFDLSKIYITNDIALTDISQQVFNNYSIIINAIKENIKKENPKKKTENEEKYGERIDKIFKSNNSFSIKYINDCIKEKNIEIYFMDFGKKENNKKVKNLFDELQNNYSMVKDLLEYKKIQSLIQDEKSIELIKNFLDSIKNIQHFLKPLYVKDNDIVKDISFYRDFEELYLNIDKITPLYNKVRNYVTQKPYSVKKIKLNFENSTLLAGWDLNKERDNTCAILRKDDLYYLAIMDVNNRNVFNEKGIDGIGYEKMEYKLLPGANKMLPKVFFSKSRIKDFNPSEQIIRNYEKETHKKGSNFSLKDCHKLIDFFKSSINKHEDWKNFNFKFSNTDKYEDLSGFYREVEQQGYKITFRNISKEYVDKLVEEGKIYLFQIYNKDFSKYSKGTPNMHTLYWKALFDEDNLKNVVYKLNGQAEIFYRKGSIEKENIVIHKANNAIENKNMDNKKKQSKFEYDIIKDRRYTVDKFQFHVPITLNFKAIGNERINEQVNQYIKDNNIKHIIGIDRGERHLLFLSLIDLKGNIIKQFSLNEIVNEYNGNSYKTNYHMLLEKREEERDKARKSWKTIENIKELKEGYISQVIHKITQLMIEYNAIVVLEDLNFGFMRGRQKVEKQVYQKFEKMLIDKLNYLVDKKKDKNEAGGLLKAHQLTNKFESFQKMGKQNGFLFYIPAWNTSKLDPITGFVNLFDTHYTNVDNAKKFFENFEDIRFNEKKNYFEFIVNDYTKFNTKAEGTKLNWTICSNEDRIKTFRSSSKNNQWVSETVNLTDSLIELFKKYDIDYKLELKEQIISKSEKNFFETLLYLFKLTLQMRNSITGTETDYLISPVADKTGNFFDSRKGIENLPNNADANGAYNIARKGLWVIEQIKKAKDLKKVKLAISNKEWLQFVQGK

SEQ ID NO: 74 - protein, 1262 aa, Unknown
  Description of Unknown: Cas12 sequence
MAKNTIFSQFTGLYPVSKTLRFELKPMGKTLEKIKETGVIENDKKRHNDYFDAKKIIDKYHKYFIDAALSKFPRIDWSPLKEAIERSLDRSDASKKKLEKTQTEFRKKIAKALTTHDHYKELTASTPKDLFLKVFPDHFGKQPAIDTFDGFSSYFTGFQENRQNIYSDEAISTAIPYRLVHDNFPKFLSNIEVYKTLKDNAPSVLSDAENELRDFLNGKSLANIFELNAYNEVLTQSGIDFFNQVIGGISDEGGEKKTRGINEFSNLYRQQHPEFAQKRLATKMIPLYKQILSDRETKSFILESYSNDSQVQNSVKEFFESQILNWDIAGRRVNVLNELTSLVKRISEFDLGNIYVNQEELSNISLKLFDNWNSINGLLFKHAENRIGSAEKSANKKKIDAWMKNKEFSIATLNLAIAESNSEEISRVKIESYWNNFEAKVQSILCGDNRRNLDEFISATFNENNALREDSKIIEKLKAFLDALIEIMHSIKPLISDAENRDLSFYNELIPLYDQLSLVVPLYNKIRNYATQKLTESEKFKLNFDNPTLADGWDQNKEEANTAILLLKNGLYYLGIMNAKNKPKIKDFKTSESEDCYDKMVYKLLPGPNKMLPKVFFSEKGLATFKPPKDILDGYNAGKHKKGDLFDIGFCHQLIDFFKESIAKHPDWKKFDFNFSDTSSYEDISGFYKEVTDQGYKITFSKIPTSQIDEWVKEGKLFLFQIYNKDFAPGAKGSPNLHTLYWKSVFSPENLKDVVVKLNGEAELFYRPSSVKKPYSHKVGEKLVNRIGKDGLPLPESVFGELFRYFNGKLEGELSDEAKRYLDVAVVKDVKHEIVKDRRYTQDKFEFHVPLTLNFKADSKNEYMNERVRHFLKDNPDVNIIGIDRGERHLLYMTLINQKGEILKQKSFNVVESVNYQAKLVQREKERDAARRSWSSVGKIKDLKEGFLSQVIHEITTTMIENNAIVVLEDLNFGFKRGRFCVERQVYQKFEKMLIDKLNYLVFKNKPEGDVGGVLKGYQLAEKFDSFQKLGKQSGFLFYIPAAYTSKIDPTTGFANLFNMTELTSAEKKKEFLSHFEDITYDGKNDRFLFSFDYKNFKCFQTDYIKKWTVYSQGKRIVYDKESKSAKEISPVEIIKAALAKQNIALTDQLDVLSAINSVEASPKSASFFGDICYAFEKTLQMRNSIPNTDEDYLASPVMNKRGEFYDSRSCDDALPQNADANGAYHIALKGLYLIKNVFDAGGKELKISHEDWFKFAQSRNC

SEQ ID NO: 75 - protein, 1253 aa, Unknown
  Description of Unknown: Cas12 sequence
MSKGKIWENFINQYSVSKTLRFELKPVGKTLENINAKGLIEEDEQRAEDYKKAKKIIDEYHKYFIEGALGSCSLDLNILNEFLQLYNKAQKTDADKKEYEKIQTTLRKNIAESFGKNADKKTKEQYENLFKKELLRNDLPDWVEDEEDAKIIERFKTFTTYFTGFHENRKNIYDNEEKSTAIGYRIVHENLPKFIDNMNAFEKISKALDLSEIDRDFQSELGEIKAEEFFTIEFFNQCLNQFGIDRYNTLLGGISEGENIKKKQGLNERINLYNQQLKGERKKERLPKLKVLYKQILSDSSSHSFSIDEFENDNELLESLEIFYKNELIGFNHSGVDSNIFDLVKDLLLKIDESEQSSIYLKNDKGLTEISQRIFGDWNIIKSALEEYYDEHYPPKKDTFNKKELDERSRWLKENHSIGVIEKALANYENEIVREHLKQNSAPIVSYFKSLEVDGENLIDKIYSAYGNISDLLNSSYPDEKKLVSDRTSKDKIKVFLDSLMSLLHFLKPLDVKDLGNKDSAFYGDYDFIVEQLSKLVRLYNKTRNYLTRKPYSIEKIKLNFENSTLLAGWDVNKERDNNCVIFKRQDGDRELFYLGIMDKSHNKIFTKIEEAKSDDVYQKMNYKLLPGPNKMLPKVFFSKKSIDFYAPGEELLKNYKNGTHKKGENFNLQHCHELIDFFKRSINKHEDWSQFNFKFSDTSEYEDTSFFFKEVSQQGYSITFKNIDRETIEKFVDEGKLYLFQIYNKDFSPKSKGRPNLHTLYWKMLFDERNLANTVYQLNGEAEVFYRKKSISEKDRVVHRADEPIGLKNSENSAQKSLFPYDIVKDRRFTVDKFQFHVPITLNFKSEGNERLNISVNKFLKDNPDVNIIGLDRGERHLIYLTLINQKGEILHQESLNEVMGVNYQQKLHRVEKDRTEERRNWDRIENIKELKSGYLSQVVHKISQLMVEYNAIVVMEDLNFGFKRGRIKVEKQVYQKFEKTLIDKLNYLVFKDREPEEPAGVLNALQLTNKFESFKKLGKQCGFLFYVTSDYTSKIDPATGFVNLLYPKYESVEKSQNFFRKFDNICFNSGAGYFEFDFDYSNFTDRADGTRTRWKVCTVGNERFGYNPKTKASETVNVTESLKELLLQHEIAFENGESLVESISKNTTKYFHKSLLNFLRLTLTLRHSKTGTDIDYILSPVANEEGVFFDSRNASDKMPKDADANGAYNVALKGLMVLERINAAEDLSQFKFKDMSIKNKDWLKFVQDRQG

SEQ ID NO: 76 - protein, 1271 aa, Unknown
  Description of Unknown: Cas12 sequence
MKNLANFTNLYSLQKTLRFELKPIGKTLDWIIKKDLLKQDEILAEDYKIVKKIIDRYHKDFIDLAFESAYLQKKSSDSFTAIMEASIQSYSELYFIKEKSDRDKKAMEEISGIMRKEIVECFTGKYSEVVKKKFGNLFKKELIKEDLLNFCEPDELPIIQKFADFTTYFTGFHENRENMYSNEEKATAIANRLIRENLPRYLDNLRIIRSIQGRYKDFGWKDLESNLKRIDKNLQYSDFLTENGFVYTFSQKGIDRYNLILGGQSVESGEKIQGLNELINLYRQKNQLDRRQLPNLKELYKQILSDRTRHSFVPEKFSSDKALLRSLLDFHKEVIQNKNLFEEKQVSLLQAIRETLTDLKSFDLDRIYLTNDTSLTQISNFVFGDWSKVKTILAIYFDENIANPKDRQRQSNSYLKAKENWLKKNYYSIHELNEAISVYGKHSDEELPNTKIEDYFSGLQTKDETKKPIDVLDAIVSKYADLESLLTKEYPEDKNLKSDKGSIEKIKNYLDSIKLLQNFLKPLKPKKVQDEKDLGFYNDLELYLESLESANSLYNKVRNYLTGKEYSDEKIKLNFKNSTLLDGWDENKETSNLSVIFRDTNNYYLGILDKQNNRIFESIPEIQSGEETIQKMVYKLLPGANNMLPKVFFSEKGLLKFNPSDEITSLYSEGRFKKGDKFSINSLHTLIDFYKKSLAVHEDWSVFNFKFDETSHYEDISQFYRQVESQGYKITFKPISKKYIDTLVEDGKLYLFQIYNKDFSQNKKGGGKPNLHTIYFKSLFEKENLKDVIVKLNGQAEVFFRKKSIHYDENITRYGHHSELLKGRFSYPILKDKRFTEDKFQFHFPITLNFKSGEIKQFNARVNSYLKHNKDVKIIGIDRGERHLLYLSLIDQDGKILRQESLNLIKNDQNFKAINYQEKLHKKEIERDQARKSWGSIENIKELKEGYLSQVVHTISKLMVEHNAIVVLEDLNFGFKRGRQKVERQVYQKFEKMLIEKLNFLVFKDKEMDEPGGILKAYQLTDNFVSFEKMGKQTGFVFYVPAWNTSKIDPKTGFVNFLHLNYENVNQAKELIGKFDQIRYNQDRDWFEFQVTTDQFFTKENAPDTRTWIICSTPTKRFYSKRTVNGSVSTIEIDVNQKLKELFNDCNYQDGEDLVDRILEKDSKDFFSKLIAYLRILTSLRQNNGEQGFEERDFILSPVVGSDGKFFNSLDASSQEPKDADANGAYHIALKGLMNLHVINETDDESLGKPSWKISNKDWLNFVWQRPSLKA

SEQ ID NO: 77 - protein, 816 aa, Unknown
  Description of Unknown: Cas12 sequence
MNLIENETKSEEIKSKLDSIMEIMHWTKMFIIEEEIEKDVNFYNEIEEIYDELQPLVTIYNRIRNYVTQKPYSEEKIKLNFGIPTLANGWSKTKEYDNNAIIMIRDGKYYLGIFNAKNKPDKKIMEGHQSEENGDYKKMIYRLLPGPNKMLPKVFMSKTGIAEYKPSQYILECYEQNKHIKSDKNFDIKFCRDLIDFFKTSINRHPEWSKFNFKFSETSEYEDISTFYREVEKQGYKIEWTYISEKEIKELDENGQLYLFQIYNKDFSEKSKGKENLHTMYLKNLFSEENLKNIVLKLNGEAEVFFRKSSIKKPIIHKKGSVLVNKTYNENGERKSIPEEQYTEIYKYLNSIGTNELSEKSKKLMEEGKVEYYKANYDIVKDYRYSVDKFFIHLPMTINFKAAGFSPINNIALKSIALKEDMHIIGIDRGERNLIYVSVIDTKGNIVEQRNFNIVNGIDYKEKLKQKELDRDNARKNWKEIGKIKDLKEGYLSLVVHEIAKLVVKYNAIITMEDLNQGFKRGRFKVERQVYQKFETMLINKLNYLVDKDLAVDQEGGLLRGYQLTYIPESLKVLGRQCGYIFYVPVAYTSKIDPTTGFVAIFNYKGMTDKDFVTSFDSIKYDDERGLFAFEFDYENFVTHKVEMARNKWTVYTYGERIKRKFKNGLWDTAEKVDLTYQMRSILEKYEIEYNKGQDILEQIEELDEKAQNGICKEIKYLVKDIVQMRNSLPDNAVEDYDAIISPVINNNGEFFDSTRGDEDKPLDADANGAYCIALKGLYEVMQIKKNWNEETEFPRKELKIRHQDWFDFIQNKRYL

SEQ ID NO: 78 - protein, 869 aa, Unknown
  Description of Unknown: Cas12 sequence
MENRYQVLQGLTAAQKKAAAAAKKRSSFSIVELNAATRSRVPDEKYVPVQNYFSAMGKVCSQGEPKRENFVTRICAAYQELEEYIPSIRKSLLQEKRATELIKNYLDAVNDLLRFIKPLLGRGNETDKDANFYGEFSFLTDCLFAIVPLYNEVRNYLTQKPYSTEKFKLNFRGSTLLNGWDKNKERDNLGVILRKEGKYFLAIMNKKHNTLFTEGKLQQHTGGECYQKMEYKLIPGSKMLPKVFFSKKGISTFQPSEELLLNYRIGTYKKGEKFNLEHLHKLIDFYKHSIAVHEDWSKFDFHFSDTSSYRDISGFYKEVEQQGYKLTFRNVSVSYINRLVEEGKLYLFQIYNKDFSEYSKGTPNLHTLYWKMLFDPENLKDVVYKLSGEAEVFFRKKSLDVSHPTHPKNEPIEKKNINNKGEKSLFSYDLIKDRRFTVDKFQFHVPITMNFKGEQGDRVNQMVQSYVRNNKGLNVIGIDRGERNLLYLVVINEHGEILEQFSLNEIRNAYNGKEHKIDYHTLLEERSKKRQDARQSWQTIEGIKDLKTGYLSQVIHVITQLMVKYNAIVVLEDLNFGFKSSRQKFEQSVYQQFERKLIDKLNFLVNKKAAPNEVGGLLNAYQLTAPLGNSRKMGKQNGFLFYVPAWHTSKIDPRTGFVNLLDTRYENVAKAKEFFAKFASITYNPEKKWFEFAFDYKAFGNRADGSRTKWTICSYGERIETFRNPENNNQWDTKSVPLTERLTELFSKYGIDYTTNLKEQILNQTDKAFFVELLGALRLTLQLRNSRKSTGEDFLFSPVADENGCFFDSREANDNEPKDADANGAYHIALKGLWVLDTIRNTEEGKNPKLAITNKEWLSFAQAKPFAHE

SEQ ID NO: 79 - protein, 884 aa, Unknown
  Description of Unknown: Cas12 sequence
MSDSYDELTKAQKEKQEKRKHVALTEVVAALEKYTIALDNGHEHKNAVNTFKNYFQNYFFHFDTDKKKTAKTLDCQIKDEYNGLKGILNTPWDKNKKLQQDKKLVQQIKSFLDSIQELLWFIKPLVLTDNTLEKDERFYGEFMPLYDEISNIIKLYNKIRNYLTKKPYSIEKYKLNFENGSLLSGWDVNKEKDNTSVLLCKDNQYYLAIMHIDHNKVFELDELIKHAGKGYQKINYKLLPGANKMLPKVFFSGKNISYYDPSKEILKIRNYGTHTKNGDPQPGFSKRDFSVDDCRKMIDFFKNSIAKHEDWKNFDFKFQPTKNYNSIDEFYREVEEQGYKITYSNVSEDYIDSLVEYGKIYLFHIYNKDFSDKRDESKKHTDNMHTLYWKALFDAKNLKDVVYKLNGEAEIFYRKKSIDIKKPTHEKGKPIDNKNPNARKKTSVFKYDLIKDKRFTVDKFFFHVPITLNFKSKSGYLSNDDVNAAIKKNNDIKIIGLDRGERNLIYLSLINSKGEIAYQESLNVVSTDKGFDVNYHKLLDDKEGNRDEARKNWDKIENIKELKAGYLSQVIHKIAKLMIDNNAIVVMEDLNFGFKRGRFKVEKQIYQKFEKMLIDKLNYLVFKNVHPEQAGGLYKAYQLTAQFESFKKLGKQSGFLFYIPAWNTSKIDPTAGFVDFLKPRYESVTQAKSFLQRFDKINYNKTKDYFEFAFDYKNFTDKANDTKTDWVVCTYGTERYYYDVRTKTTQKIDITAELKKLLEKSEINYLNGKDIKELIIAVDSKEFHSALLKYLAIVLALRYSDSQSGRDFILSPVANEQGHFFNSDKTDDTLPKDADANGAYHIALKGLWAINQIRKTKNGDKLKLTISNKDWLNFVQKKEYRKGV

SEQ ID NO: 80 - protein, 1250 aa, Unknown
  Description of Unknown: Cas12 sequence
MQTLFENFTNQYPVSKTLRFELIPQGKTKDFIEQKGLLKKDEDRAEKYKKVKNIIDEYHKDFIEKSLNGLKLDGLEKYKTLYLKQEKDDKDKKAFDKEKENLRKQIANAFRNNEKFKTLFAKELIKNDLMSFACEEDKKNVKEFEAFTTYFTGFHQNRANMYVADEKRTAIASRLIHENLPKFIDNIKIFEKMKKEAPELLSPFNQTLKDMKDVIKGTTLEEIFSLDYFNKTLTQSGIDIYNSVIGGRTPEEGKTKIKGLNEYINTDFNQKQTDKKKRQPKFKQLYKQILSDRQSLSFIAEAFKNDAEILEAIEKFYVNELLHFSNEGKSTNVLDAIKNAVSNLESFNLTKMYFRSGTSLTDVSRKVFGEWSIINRALDNYYATTYPIKPREKSEKYEERKEKWLKQDFNVRLIQTAIDEYDNETVKGKNSGKVIADYFAKFCDDKETDLIQKVNEGYIAVKDLLNTPYPENEKIGSNKDQVKQIKAFMDSIMDIMHFVRPLSLKDTDKEKDETFYSLFTPLYDHLTQTIALYNKVRNYLTQKPYSTEKIKLNFENSTLLGGWDLNKETDNTAIILRKDNLYYLGIMDKRHNRIFRNVPKADKKDFCYEKMVYKLLPGANKMLPKVFFSQSRIQEFTPSAKLLENYANETHKKGDNFNLNHCHKLIDFFKDSINKHEDWKNFDFRFSATSTYADLSGFYHEVEHQGYKISFQSIADSFIDDLVNEGKLYLFQIYNKDFSPFSKGKPNLHTLYWKMLFDENNLKDVVYKLNGEAEVFYRKKSIAEKNTTIHKANESIINKNPDNPKATSTFNYDIVKDKRYTIDKFQFHIPITMNFKAEGIFNMNQRVNQFLKANPDINIIGIDRGERHLLYYALINQKGKILKQDTLNVIANEKQKVDYHNLLDKKEGDRATARQEWGVIETIKELKEGYLSQVIHKLTDLMIENNAIIVMEDLNFGFKRGRQKVEKQVYQKFEKMLIDKLNYLVDKNKKANELGGLLNAFQLANKFESFQKMGKQNGFIFYVPAWNTSKTDPATGFIDFLKPRYENLNQAKDFFEKFDSIRLNSKADYFEFAFNFKNFTEKADGGRTKWTVCTTNEDRYAWNRALNNNRGSQEKYDITAELKSLFDGKVDYKSGKDLKQQIASQESADFFKALMKNLSITLSLRHNNGEKGDNEQDYILSPVADSKGRFFDSRKADDDMPKNADANGAYHIALKGLWCLEQISKTDDLKKVKLAISNKEWLEFVQTLKG

SEQ ID NO: 81 - protein, 810 aa, Unknown
  Description of Unknown: Cas12 sequence
MQLTDNLSDKYKEAAPLLNENYSNEKGLKNDDKSISLIKNFLDAIKEIEKFIKPLSETNITGEKNDLFYSQFTPLLDNISRIDILYDKVRNYVTQKPFSTDKIKLNFGNSQLLNGWDRNKEKDCGAVWLCKDEKYYLAIIDKSNNSILENIDFQDCDESDCYEKIIYKLLPGPNKMLPKVFFSEKCKKLLSPSDEILKIRKNGTFKKGDKFSLDDCHKLIDFYKESFKKYPNWLIYNFKFKKTNEYNDIREFYNDVASQGYNISKMKIPTSFIDKLVDEGKIYLFQLYNKDFSPHSKGTPNLHTLYFKMLFDERNLEDVVYKLNGEAEMFYRPASIKYDKPTHPKNTPIKNKNTLNDKKTSAFPYDLIKDKRYTKWQFSLHFPITMNFKAPDRAMINDDVRNLLKSCNNNFIIGIDRGERNLLYVSVIDSNGTIIYQHSLNIIGNKFKGKTYKTNYREKLATREKDRTEQRRNWKAIESIKELKEGYISQAVHVICQLVVKYDAIIVMEKLTEGFKRGRTKFEKQVYQKFEKMLIDKLNYYVDKKLDPDEEGGLLHAYQLTNKLESFDKLGTQSGFIFYVRPDFTSKIDPVTGFVNLLYPRYENIDKAKDMISRFDEIRYNAGEDFFEFDIDYDKFPKTASDYRKKWTICTNGERIEAFRNPANNNEWSYRTIILAEKFKELFDNNSINYRDSDDLKAEILSQTKGKFFEDFFKLLRLTLQMRNSNPETGEDRILSPVKDKNGNFYDSSKYDEKSKLPCDADANGAYNIARKGLWIVEQFKKADNVSTVEPVIHNDKWLKFVQENDMTNN

SEQ ID NO: 82 - protein, 875 aa, Unknown
  Description of Unknown: Cas12 sequence
MLPNEKERNEFKNSNAKQYIREISNIITDTETAHLEYDEHISLIESEEKADEMKKRLDMYMNMYHWAKAFIVDEVLDRDEMFYSDIDDIYNILENIVPLYNRVRNYVTQKPYNSKKIKLNFQSPTLANGWSQSKEFDNNAIILIRDNKYYLAIFNAKNKPDKKIIQGNSDKKNDNDYKKMVYNLLPGANKMLPKVFLSKKGIETFKPSDYIISGYNAHKHIKTSENFDISFCRDLIDYFKNSIEKHAEWRKYEFKFSATDSYNDISEFYREVEMQGYRIDWTYISEADINKLDEEGKIYLFQIYNKDFAENSTGKENLHTMYFKNIFSEENLKDIIIKLNGQAELFYRRASVKNPVKHKKDSVLVNKTYKNQLDNGDVVRIPIPDDIYNEIYKMYNGYIKENDLSEAAKEYLDKVEVRTAQKDIVKDYRYTVDKYFIHTPITINYKVTARNNVNDMAVKYIAQNDDIHVIGIDRGERNLIYISVIDSHGNIVKQKSYNILNNYDYKKKLVEKEKTREYARKNWKSIGNIKELKEGYISGVVHEIAMLMVEYNAIIAMEDLNYGFKRGRFKVERQVYQKFESMLINKLNYFASKGKSVDEPGGLLKGYQLTYVPDNIKNLGKQCGVIFYVPAAFTSKIDPSTGFISAFNFKSISTNASRKQFFMQFDEIRYCAEKDMFSFGFDYNNFDTYNITMSKTQWTVYTNGERLQSEFNNARRTGKTKSINLTETIKLLLEDNEINYADGHDVRIDMEKMDEDKNSEFFAQLLSLYKLTVQMRNSYTEAEEQEKGISYDKIISPVINDEGEFFDSDNYKESDDKECKMPKDADANGAYCIALKGLYEVLKIKSEWTEDGFDRNCLKLPHAEWLDFIQNKRYE

SEQ ID NO: 83 - protein, 1238 aa, Unknown
  Description of Unknown: Cas12 sequence
MSNLYSNLHNLYPVQKTLRFELKPQGKTKENMEKAGILKADEHRAEVYGKVKKYCDEYHKTFIDRCLSNIELNEIDKYYELYSINNRDDKQKEELDQLETGLRKQISDAFKKSAEYKGLFQKDMITSYLVTMYKENQEKMQDIGEFNRFTTYFTGYNKNRENMYSEEDKSTAISYRLINENLPTFIDNIKIYKKIVSLMPENIEKIYKDLEEYIQVNSVDEIFNISYYNDVLTQRGIECYNILISGRTKNDGDKIKGLNEYINEFNQTHNEKIPKLQELYKQILSDAESASFKVDIIENDKELLNLIEVYYANILPTLNKIEDLFTRISNYNLELILVNNDGSLSTLSNMVFNEWSYIKGIISQKYDAEYSGKEKYGTEKYAQKKQEYLKKQKIYSLKFLNDCIGNNAICEYLKNYIIQNKNIETIKEDYNEVQNIKAEDDTKELIKDEKSIEKIKKFLDDVKSLQEFVKLVIPKDRTVEKDAKFYSELTPYYEKIKEIIPLYNKVRNYVTQKPYSTEKIKLNFECPTLLNGWDANKEEANLGVILLKEGKYYLGIMNPYCKKIFEVYEKDSNEQNNYKKMEYKLLPGPNKMLPKVFFSNSRIEEFNPSKELQEKYNKGYHKKGKDFDINFCHELIDFYKQSLNKHEDWKKFNFKFKDTSEYNDISEFYREVEEQGYKIEYTEYSEKYINELVDRGELYLFQIYNKDFSEYSKGKENLHTLYWKAVFDPDNIMNPVYKLNGNAEIFYRKKSLEMKVTHPANQPIANKNISTIEAGRSTSTFKYDLIKDKRYTMDKFQFHVPITVNFKSERLFNINQIVNKYLKYNDDIHVIGIDRGERNLLYVCVIDKNEKIVYQKSLNEIVSEYNNNRYTTDYHGLLDRKEKEREIAREDWKNIENIKELKEGYMSQIIHILVELMKKYNAIIVIEDLNKGFKNSRIKVEKQVYQKFEKMFIDKLNYLVFKDEDKMDEGGVLNAYQLTNKFESFTKLGKQSGILYYIPAWCTSKIDPTTGFINRFYLKYENFDKSKEFVNRIDDIRYNEKENLFEFDIDYSKFTDRLNDTKNKWTLCSYGERILTQKNANGEWFDRRIQLSIEFKNLFEKYVINLNNIKDSILKLDKDNIEFYKGNGENLGFIQLFKLMVQMRNSLTGKEEDNLISPVKNQHGKFFNTSERVEGLPIDADANGAYNIARKGFMLVEQMKNVEDEKLNKIKYNITEKEWLNYVQNRGMWWKRQYLYHI

SEQ ID NO: 84 - protein, 1262 aa, Unknown; identical to SEQ ID NO: 74
  Description of Unknown: Cas12 sequence

SEQ ID NO: 85 - protein, 1140 aa, Unknown
  Description of Unknown: Cas12 sequence
MYKDKTDKTKIIDSDLIKFINIAESTQLDSMSQDEAKELVKEFWGFTTYFVGFYDNRKNMYTAEEKSTGIAYRLVNENLPKFIDNMEAFKKAIARPEIQANMEELYSDFSEYLNVESVQEMFQLDYYNMLLTQKQIDVYNAIIGGKTDDEHDVKIKGINEYINLYNQQHKDDKLPKLKALFKQILSDRNAISWLPEEFNGDQEVLNAIKDCYERLSENVLGDKVLKSLLGSLSDYSLDGIFIRNDLQLTDISQKMFGNWCVIQNAIMQNIKHVAPARKHKESEEDYEKRIAGIFKKVDSFSISFINDCLNEADPNNAYFVENYFATFGAVNTPTMQRENLFALVQNAYTEVAALLHSDYPTAKHLAQDKVNVAKIKALLDAIKSLQHFVKPLLGKGDESDKDERFYGELASLWAELDTVTPLYNMIRNYMTRKPYSQKKIKLNFENPQLLGGWDANKEKDYATIILRRDGLYYLAIMNKESKKLLGKAMPSDGECYEKMVYKLLPGANKMLPKVFFAKSRMEDFKPSKELVEKYNNGTHKKGKNFNIQDCHNLIDYFKQSISKHEDWGKFGFNFSDTSTYEDLSGFYREVEQQGYKLSFARVSVSYISQLVEEGKMYLFQIYNKDFSEYSKGTPNMHTLYWKALFDERNLADVVYKLNGQAEMFYRKKSIENTHPTHPANHPILNKNKDNKKKESLFDYDLIKDRRYTVDKFMFHVPITMNFKSSGSENINQDVKAYLRHADDMHIIGIDRGERHLLYLVVIDLQGNIKEQYSLNEIVNEYNGNTYHTNYHDLLDVCEEERLKARQSWQTIENIKELKEGYLSQVIHKITQLMVKYHAIVVLEDLNMGFMRGRQKVEKQVYQKFEKMLIDKLNYLVDKKADASVSGGLLNAYQLTSKFDSFQKLGKQSGFLFYIPAWNTSKIDPVTGFVNLLDTRYQNVEKAKVFFSKFDAIRYNKDKDWFEFNLDYDKFGKKAEGTRTKWALCTRGMRIDTFRNKEKNSQWDNQEVDLTAEMKSLLEHYYIDIHGNLKDAISAQTDKAFFTGLLHILKLTLQMRNSITGTETDYLVSPVADENGIFYDSRSCGDELPENADANGAYNIARKGLMMIEQIKDAKDLDNLKFDISNKSWLNFAQQKPYKNE

SEQ ID NO: 86 - protein, 832 aa, Unknown
  Description of Unknown: Cas12 sequence
MNEADPNNAYFVENYFATFGAVNTPTMQRENLFALVLNAYTEVASLLHSYYPAEKNLAQDKANVAKIKALLDAIKSLQHFVKPLLGKGDESDKDERFYGELASLWAELETVTPLYNMIRNYMTRKPYSQKKIKLNFENPQLLGGWDANKEKDYATIILRRNGLYYLAIMDKDSRKLLGKAMPSDGECYEKMVYKLLPGANKMLPKVFFAKSRMEDFKPSKELVEKYNNGTHKKGKNFNIQDCHNLIDYFKQSISKHEDWGKFGFNFSDTSTYEDLSGFYREVEQQGYKLSFARVSVSYISQLVEEGKMYLFQIYNKDFSEYSKGTPNMHTLYWKALFDERNLADVVYKLNGQAEMFYRKKSIENTHPTHPATHPILNKNKDNKKKESLFEYDLIKDRRYTVDKFMFHVPITMNFKSVGSENINQGVKEYLHHADDMHIIGIDRGERHLLYLVVIDLQGNIKEQYSLNEIVNEYNGNTYHTNYHDLLDAREDERLKARQSWQTIENIKELKEGYLSQVIHKITQLMVKYHAIVVLEDLNMGFMRGRQKVEKQVYQKFEKMLIDKLNYLVDKKADASVSGGLLNAYQLTSKFDSFQKLGKQSGFLFYIPAWNTSKIDPVTGFVNLLDARYQNVEKAKAFFSKFDAIRYNKDKDWFEFNLDYDKFGKKAEGTRTKWTLCTRGMRIDTFRNKEKNSQWDNQEVDLTAELKSLLEHYYIDIHGNLKEAISTQTDKAFFTGLLHILKLTLQMRNSITGTETDYLVSPVADENGIFYDSRTCGDELPENADANGAYNIARKGLMMIEQIKNAEDLGNLKFDISNKAWLNFAQQKPYKNG

SEQ ID NO: 87 - protein, 831 aa, Unknown
  Description of Unknown: Cas12 sequence
MDNNNLHAVDGYFATLGAVNTPTMQRENLFALIQNAYTDISDLLDTPYPENKNLAQDKTNVAKVKALLDAIKSLQHFVKPLLGMGDESDKDERFYGELASLWTELDTVTPLYNMIRNYMTRKPYSEKKIKLNFENPQLLGGWDANKEKDYATIILRRNGMYYLAIMDKDSKKLLGKTMPSDGECYEKMVYKLLPGANKMLPKVFFAKSRINDFKPSKKIVENYNNGTHKKGKNFNINDCHDLIDYFKQSIDKHEDWSKFGFNFSDTSTYEDLSGFYREVEQQGYKLSFTNISVSFIDKLVDEGKMYLFQIYNKDFSDYSKGTPNMHTLYWKALFDERNLADVVYKLNGEAEMFYRKKSINNTHPTHHANHPIQNKNKDNKKKESVFEYDLVKDRRYTEDKFLFHVPITMNFNSVGAENINQQVRKYLQQADDTHIIGIDRGERHLLYLVVIDMQGNIKEQFSLNEIVNEYNGNTYRTNYHDLLDVRADKRLKASQSWQTIENIKELKEGYLSQAIHKITQLMVKYHAVVVLEDLNKGFMRGRQKVEKQVYQKFEKMLIDKLNYLVDKHKDANETGGLLHALQLTSEFKNFKKSEYQNGFLFYIPAWNTSKIDPVTGFVNRFDTRYTNAVEAQKFFRKFDEIRYNEEKDWFEFEFDYDKFTQKAHGTRTRWTLCTHGKRLRSFRNPAKQYNWDSEVVALTDEFKRILGEAGIDIHENLKDAISNLEGKRRKYLEPLMQFMKLLLQLRNSRKNPEEDYILSPVADENGVFYDSRSCGDKLPENADANGAYNIARKGLMLIRQIKEAKELGKVKYDISNKAWLNFAQQKPYKNE

SEQ ID NO: 88 - protein, 1177 aa, Unknown
  Description of Unknown: Cas12 sequence
MQKKAFEENQQNLRSIIAKKLTEDKAYANLFGKNLLESYKDKTDKTKIIDSDLIKFINTAESTQLDSMSQDEAKEIVKEFWGFTTYFVGFFDNRKNMYTAEEKSTGIAYRLINENLPKFIDNMEAFKKAIARPEIQADMEELYSNFSEYLNVESIQEMFLLDYYNMLLTQKQIDVYNAIIGGKTDDEHDVKIKGINEYINLYNQQHKDDKLPKLKALFKQILSDRNAISWLPEEFNSDQEVLNAIKDCYERLSENVLGDKVLKSMLGSLADYSLDGIFIRNDLQLTDISQKMFGNWSVIQNAIMQNIKHVAPARKHKESEEEYENRIAGIFKKADSFSISYIDACLNETDPNNAYFVENYFATLGAVDTPTMQRENLFALVQNAYTEITALLHSDYPTEKNLAQDKANVAKIKALLDAIKSLQHFVKPLLGKGDESDKDERFYGELASLWAELDTMTPLYNMIRNYMTRKPYSQKKIKLNFENPQLLGGWDANKEKDYATIILRRNGLYYLAIMNKDSKKLLGKAMPSDGECYEKMVYKLLPGANKMLPKVFFAKSRMEDFKPSKELVEKYNNGTHKKGKNFNIQDCHNLIDYFKQSIDKHEDWSKFGFKFSDTSTYEDLSGFYREVEQQGYKLSFARVSVSYINQLVEEGKMYLFQIYNKDFSEYSKGTPNMHTLYWKALFDERNLADVVYKLNGQAEMFYRKKSIENTHPTHPANHPILNKNKDNKKKESLFEYDLIKDRRYTVDKFMFHVPITMNFKSVGSENINQDVKAYLRHADDMHIIGIDRGERHLLYLVVIDLQGNIKEQFSLNEIVNDYNGNTYHTNYHDLLDVREDERLKARQSWQTIENIKELKEGYLSQVIHKITQLMVKYHAIVVLEDLNMGFMRGRQKVEKQVYQKFEKMLIEKLNYLVDKKADASVSGGLLNAYQLTSKFDSFQKLRKQSGFLFYIPAWNTSKIDPITGFVNLLDTRYQNVEKAKAFFSKFDAIRYNKDKEWFEFDLDYDKFGRKAEGTRTKWTLCTRGMRIDTFRNKEKNSQWDNQEIDLTAEMKSLLEHYYIDIQGNLKEAICTQTDKAFFTGLLHILKLTLQMRNSITGTQTDYLVSPVADENGIFYDSRSCGDSLPENADANGAYNIARKGLMLIEKIKNAEDLDTIKFDISNKAWLNFAQQKPYKNG

SEQ ID NO: 89 - protein, 814 aa, Unknown
  Description of Unknown: Cas12 sequence
MLENEQEAEKIKNKLDDIMNIYHWIKIFLVDEEIEKDMDFYSEIEDIYEELSPLVSLYNRVRNYVTQKPYSQEKMKLNFGSPTLADGWSKSKEFSNNAIIMLKDGKYYIGIFNIRNKPNKEVIEGRNNRINDSDYKKMVYRLLPGANKMLPKVMFSKKGIEYYNPSQYILSGYNSKKHIKSNENFDINFCHDLIDFFKESINKNEEWKNFDFKFSDTESYNDISEFYREVEQQGYKIEWVYISEQDIEQLEKNGQLYIFQIYNKDFAKKSIGNKNLHTMYLENLFSEENLKDVVLKLNGEAEIFFRKSSIKKPIVHKAGSILVNKCIEDETGNKVSFPDDIYNEIYQYMNGMTDVLSERAQNYYEKVKHSVSKQDIVKDYRYTVDKYFIHLPITINFKASSFMPINDIALKYIAKRDDIHIIGIDRGERNLIYVSVIDLQGNIVYQKNYNVVNGYDYKAKLRETEIQRDNARKNWKEIGKIKQLKEGYLSLVVHEIAQLIVKYNAIVVMEDLNMGFKRGRFKVERQVYQKFENMLINKLNYLVDKNKKVDEDGGLLRGYQLTYVPGQKEHVGKQCGFIFYVPAAYTSKIDPTTGFVSIFNNKVNAKEFVTKFDSIKYNKNMKMFELKFDYNNFETYNITLAKSKWTIYTNGIRLKREYNNGRWNKITEVDLTKEMANTLKKYDIEFENNEEILKSISQLDEKNQRNICNEIKEIIKLIVQLRNSMPDNGSKDNEYDKIISPVLNENNYFYDSSEVCDNSAPENADANGAYCIAMKGLYQVIQIKENWSQDSNPKNILGIKHYEWFDFMQNKRYL

SEQ ID NO: 90 - protein, 1262 aa, Unknown
  Description of Unknown: Cas12 sequence
MAKNTIFTQFTGLYPVSKTLRFELKPMGKTLEKIKETGVIENDKKRHNDYFDAKKIIDKYHKYFIDAALSKFSRIDWNPLKEAIEGSLDRSDASKKKLEKTQTEFRKKIAKALTTHDHYKELTASTPKDLFLKVFPDHFGKQPAIDTFDGFSSYFTGFQENRQNIYSDEAISTAIPYRLVHDNFPKFLSNIEVYKTLKDNAPSVLSDAENELKDFLNGKPLANIFELNAYNDVLTQSGIDFFNQVIGGISGEGGEKKTRGINEFSNLYRQQHPEFAQKRLATKMIPLYKQILSDRETKSFILESYSTDSQVQESVKEFFESQILNCDIAGRKVNVLNELTSLIKRIAEFDLGSIYINQEELSNISLELFKSWNTINAVLFKNAENRIGSAEKAANKKKIDAWMKSNEFSIATLNLAIAESDSEEISRVKIESYWNDFEAKVQSILCGDNRRNLDEFLSATFNENNALREDSEIIGKLKAFLDALIEIMHSIKPLISDAENRDLSFYNELMPLYDQLSLVVPLYNKIRNYATQKLTESEKFKLNFDNPTLADGWDQNKEDANTAILLLKNGLYYLGIMNAKNKPKIKDFKTSESEDCYDKMVYKLLPGPNKMLPKVFFSEKGLATFKPPKDILDGYNAGKHKKGDLFDIGFCHQLIDFFKESIAKHPDWKKFDFKFSDTSSYEDISGFYKEVTDQGYKITFSKIPTSQIDEWVNEGKLFLFQIYNKDFAPGAKGSPNLHTLYWKSVFSPENLKDVVVKLNGEAELFYRPSSVKKPYSHKVGEKLVNRIGKDGLPLPESVFGELFRYFNGKLDGELSDEAKRYLDVAVVKDVKHEIVKDRRYTQDKFEFHVPLTLNFKADSKNEYMNERVRHFLKDNPDVNIIGIDRGERHLLYMTLINQKGEILKQKSFNIVESVNYQAKLVQREKERDAARKSWSSVGKIKDLKEGFLSQVIHEITTTMIENNAIVVLEDLNFGFKRGRFCVERQVYQKFEKMLIDKLNYLVFKNKPEGDVGGVLKGYQLAEKFDSFQKLGKQSGFLFYIPAAYTSKIDPTTGFANLFNMTELTSAEKKKDFLSHFDDITYDGKNDRFLFGFDYKNFKCFQTDFIKKWTVYTQGKRIVYDKESKSAKEIFPVEIIKAALAKQNIALTDQLDVLSAINSVEASPKSASFFGNICYAFEKTLQMRNSIPNTDEDYLVSPVMNKRGEFYDSRSCDDALPQNADANGAYHIALKGLYLIKNVFDAGGKDLKISHEDWFKFAQSRNC

SEQ ID NO: 91 - protein, 791 aa, Unknown
  Description of Unknown: Cas12 sequence
MRPVLQLTDTEDKLSQNKPAVGKIKALLDAFKDLQHFIKPLLGSGEENEKDELFYGAFQLIWDELDTVTPLYNKVRNWLTRKPYSTEKIKLNFDNAQLLGGWDVNKEPDCTGVLLRKDGFYYLGIMNKKSNRIFDADVTPADGICYEKIDYKLLPGANKMLPKVFFSKSRIDEFAPSEAILSSYKRGTHKKGADFSLSDCHRLIDFFKASINKHEDWSKFGFQFSDTKTYEDISGFYREVEQQGYMLSSHQVSEAYINQMVEEGKLFLFRIWNKDFSEYSKGTPNMHTLYWRMLFDERNLADVVYKLNGQAEVFYRKASIKAENQIMHPAHHPIENKNTLNEKRSSTFDYDLVKDRRYTVDKFQFHVPITINFKAIGQTNVNPIVHETIRRGGFTHVIGIDRGERHLLYLSLIDLKGHIVKQMTLNEIINEYNGLAHKTNYYDLLVKREGERTTARRSWDTIENIKELKEGYLSQVIHIISKMMVEYNAIVVLEDLNMGFMRGRQKIERQVYEKFEKMLIDKLNCYIDKQADSQSEGGLLHPIQLANKFESFRKLGKQSGCLFYIPAWNTSKIDPVTGFVNLFDTRYETREKAKLFFSHFQRICFNAEKDWFEFSFDYNDFTTKAEGTRTQWTLCSYGTRIRNFRNPLQNHQWDDEEIVLTEAFKALFDKYDIDIHANLKEAINAQTDAQFFKDLMGLMKLLLQMRNSKTNSEVDYLLSPVADEHGRFFDSRAGAGSLPDNADANGAYNIARKGLWVIRKIQETPEGEKLSLAITNKEWLEFAQTKPYLND

SEQ ID NO: 92 - protein, 1262 aa, Unknown
  Description of Unknown: Cas12 sequence
MNLNTYFSQFTGLYPVSKTLRFELKPMGKTLEKIKETGIIENDKKRHNDYFDAKKIIDKYHKYFIDAALSKFPCIDWNPLKEAIERSLDRSDASKKKLEKTQTEFRKKIAKALTTHGHYKELTASTPKDLFLKVFPDHFGKQPAIDTFDGFSSYFTGFQENRQNIYSDEAISTAIPYRLVHDNFPKFLSNIEVYNILKDNAPSVLSDAENELKDFLNGKPLANIFELNAYNDVLTQSGIDFFNQVIGGFSGEGGEKKTRGINEFSNLYRQQHPEFAQKRLATKMIPLYKQILSDRETKSFILESYSTDSQVQESVKEFFESQILNCDIAGRKVNVLKELSSLIKRITEFDLGSIYVNQEELSSISLELFKSWNTINAILFKNAENRIGSAEKAANKKKIDAWMKSNEFSIATLNLAIAESDSEEISRVKIESYWNNFEAKVQSILCGDNRRNLDEFISATFNENNALREDSKVIEKLKAFLDALIEIMHSIKPLISDAENRDLSFYNELMPLYDQLSLVVPLYNKIRNYATQKLTESEKFKLNFDNPTLADGWDQNKEEANTAILLLKNGLYYLGIMNAKNKPKIKDFKTSESEDCYDKMVYKLLPGPNKMLPKVFFSEKGLATFKPPKDILDGYNAGKHKKGDLFDIGFCHQLIDFFKESIAKHPDWKKFDFKFSDTSSYEDISGFYKEVTDQGYKITFSKIPTPQIDEWVNEGKLFLFQIYNKDFAPGAKGSPNLHTLYWKSVFSPENLKDVVVKLNGEAELFYRPSSVKKPYSHKVGEKLVNRIGKDGLPLPESVFGELFRYFNGKLDGELSDEAKRYLDVAVVKDVKHEIVKDRRYTQDKFEFHVPLTLNFKADSKNEYMNERVRHFLKDNPDVNIIGIDRGERHLLYMTLINQKGEILKQKSFNIVESVNYQAKLVQREKERDTARRSWSSVGKIKDLKEGFLSQVIHEITTTMIENNAIVVLEDLNFGFKRGRFCVERQVYQKFEKMLIDKLNYLVFKNKPEGDVGGVLKGYQLAEKFDSFQKLGKQSGFLFYIPAAYTSKIDPTTGFANLFNMTELTSAEKKKEFLSHFEDITYDGKNDRFLFSFDYKKFKCFQTDYIKKWTVYSQGKRIVYDKESKSAKAISPVEIIKAALAKQNIALTDQLDVLSAINSVEASRETASFFGDICYAFEKTLQMRNSIPNTDEDYLVSPVMNKKGEFYDSRSCGDSLPKNADANGAYHIALKGLYLIKNVFDAGGKDLKISHEDWFKFAQSRNR

SEQ ID NO: 93 - protein, 1250 aa, Unknown
  Description of Unknown: Cas12 sequence
MQTLFENFTNQYPVSKTLRFELIPQGKTKDFIEQKGLLKKDEDRAEKYKKVKNIIDEYHKDFIEKSLNGLKLDGLEEYKTLYLKQEKDDKDKKAFDKEKENLRKQIANAFRNNEKFKTLFAKELIKNDLMSFACEEDKKNVKEFEAFTTYFTGFHQNRANMYVADEKRTAIASRLIHENLPKFIDNIKIFEKMKKEAPELLSPFNQTLKDMKDVIKGTTLEEIFSLDYFNKTLTQSGIDIYNSVIGGRTPEEGKTKIKGLNEYINTDFNQKQTDKKKRQPKFKQLYKQILSDRQSLSFIAEAFKNDTEILEAIEKFYVNELLHFSNEGKSTNVLDAIKNAVSNLESFNLTKIYFRSGTSLTDVSRKVFGEWSIINRALDNYYATTYPIKPREKSEKYEERKEKWLKQDFNVSLIQTAIDEYDNETVKGKNSGKVIVDYFAKFCDDKETDLIQKVNEGYIAVKDLLNTPYPENEKLGSNKDQVKQIKAFMDSIMDIMHFVRPLSLKDTDKEKDETFYSLFTPLYDHLTQTIALYNKVRNYLTQKPYSTEKIKLNFENSTLLGGWDLNKETDNTAIILRKENLYYLGIMDKRHNRIFRNVPKADKKDSCYEKMVYKLLPGANKMLPKVFFSQSRIQEFTPSAKLLENYENETHKKGDNFNLNHCHQLIDFFKDSINKHEDWKNFDFRFSATSTYADLSGFYHEVEHQGYKISFQSIADSFIDDLVNEGKLYLFQIYNKDFSPFSKGKPNLHTLYWKMLFDENNLKDVVYKLNGEAEVFYRKKSIAEKNTTIHKANESIINKNPDNPKATSTFNYDIVKDKRYTIDKFQFHVPITMNFKAEGIFNMNQRVNQFLKANPDINIIGIDRGERHLLYYTLINQKGKILKQDTLNVIANEKQKVDYHNLLDKKEGDRATARQEWGVIETIKELKEGYLSQVIHKLTDLMIENNAIIVMEDLNFGFKRGRQKVEKQVYQKFEKMLIDKLNYLVDKNKKANELGGLLNAFQLANKFESFQKMGKQNGFIFYVPAWNTSKTDPATGFIDFLKPRYENLKQAKDFFEKFDSIRLNSKADYFEFAFDFKNFTGKADGGRTKWTVCTTNEDRYAWNRALNNNRGSQEKYDITAELKSLFDGKVDYKSGKDLKQQIASQELADFFRTLMKYLSVTLSLRHNNGEKGETEQDYILSPVADSMGKFFDSRKAGDDMPKNADANGAYHIALKGLWCLEQISKTDDLKKVKLAISNKEWLEFMQTLKG

SEQ ID NO: 94 - protein, 1390 aa, Unknown
  Description of Unknown: Cas12 sequence
MIDNTKEKKEGSVFDGFTRKYQLSKTLRFELRPILNTPKMLDDEQVIKNDETRRKKYEAVKPWFDQLHREFIEDALKSFKFKNLAIYQDTFQTWQKDRKSKQKKDTLVKIEVGLREEIVRRFEEVANIWVRSEQYKLLGIKKEGLGMLFEAGVFRLLKERFKNEKDTTVDGNNIFDEWTRWTGYFKKFFETRKNFYKSDDTSTAIAYRVINQNLRRFCENIQIFEKISEKIEFSEVEKSFDISCAGIFSLAYYNACLLQGGIDTYNKIIGGEVDEKDKKIPGINELINKYRQDNSGEKIPFLKQLDKQIHSAKEAFIESIETNKELVGKLKTFYENAEVKIQSFRNLIADIVTDYSGYDIDKIYLTKEAVSHNASRWFASFESFERDLFAVVAEKQNKLVYELLRTHKNDSKISDKDGKFSFPDFIKCSHIKRALEKQEGRIWKGEYYEDIVDFEKIKDVFTQFLCVFKFELEQQFFRKTTSAQTGEQTKIGYEIFVTKINELITRENPVIDLEEKIAIKNFADATLLIYQIAKYFAVEKRRGWLDNYDLDDRFYKSSDIGYLNFYRDAFEQIVRPYNLFRNYLTKKPYNTNKWVLSFENPTLADGWDKNKEKTNAAVILRKDGRYYLGIIKEDCKSLFADRYSKEMSEGIESGSFQKMAYKFFPEASKMIPKCSTQTKNVKEHFRKSSSDYNLFHEKDYKISVAITKNIYELNNVFYRKDNIEESFVPKNDFEKKLGVKKFQRQYLEISRDNNGYKQALAQWIEFCIRFLKAYKSTTIFDYSRLREAKEYESLDAFYQDINALTYNISFVPISEQYIKEKNDNGELFLFEIYNKDWSLGPMDKNRKRTKNLHTLYFEQLFSKENEQENFLFQLNGEAELFFRPKTEEKRLGYKVWDAGEKKWVKAKEKEDGAVIDRKRYAKDIILFHCPITLNRVSESKTKREMDVEIREVLSSTPGVHIIGVDRGEKHLAYYSVIDQNGKIIETDTLNSIGKDGRGKPVEYASKLEKRAQEREASRRDWEEVEAIKDLKKGYISQVIRNLADLIIKHNAIIVFEDLNMRFKQIRGGIEKSAYQQLERALIDKLSFLVKKGEEDPKQTGHILRAYQLAAPVIAFKDMGKQTGLIFYTQAGYTSKTCPECGYRRNIKCLFENIEQAKTLIENLESINYNKKEDVFQISYSLEKLSSKDQKKEKKVSNELYAKTLKKDIFILTTKNALRYKWYDRYSEKAKVAKRGIDEYKGEVNESETKKGVVKEFNLTEYLKGLLKTYEIDYEHGGIREQILSVARGREFYKDFLYALFLLTETRHSISGRNTDYIQCPECEFDSRKGFKDIKEFNGDANGAYNIARKGIMILEKIKQFKKDNDGNLEKMGWGDLSISIEEWDKFTQKE

SEQ ID NO: 95 - protein, 1333 aa, Unknown
  Description of Unknown: Cas12 sequence
MKNFQDFTNLYELSKTLRFELKPIGGTKKLIEEKNILKLDKKKRENYEKVKPYFNKIHQEFINFALRNPNFDFSQFEEKYLNWLKDKKNKDLLKEKESIDKIFLEKIGKLFENSVKDFLKENGFESIVKEEDQNLKFFRRKEIFEVLQEKYGSELETQMVNKDGEIKSIFNGWEKWLGYFDKFFNTRDNFYKTDGTSTAIATRIIKDNLKIFLENIVAFGKIKNKKIDFSEVEKNFSVSIDTFFEINNFNNCFLQDGIDFYNKVIGGETLENGEKLKGLNEIINKYRQDTGEKIPYFKKLQKQILSEKDGVFIDKIEDDGGFYEVLKNFYKNAAEKEGFLKNIFENFYTISDKNLEKIYFNKIAFNTISHKFGSALEFERILYEEMKKEKADGIKFEKKENKYKFPDFIQIIFIKRSLENYDSENLFWKERYYKSEENVDGFLEKNNNNLWGQFCKILNFEFLNILKRRIIDEAGEEYEVGFEISKNILGEKLENFELNQENKGIIKDFADYSLALYSFGKYFAVEKGRNWDLNIDISDDFYGGEDGYIEKFYNTGYDEIVKPYNLMRNYISKKPWEDNKKWKINFETSSLLSGWDKNLESNGSYIFQKGNKYYLGIINGSKPAKEILEKLYSGDGEKIKRFIYDFQKPDNKNTPRMFIRSKKDSFSPAVEKYNLPINDILEIYDNGLFKTENKGNPNYKESLRKLIDYFKLGFSRHESFKHFNFVWKDSKSYENIADFYRDVEKSCYKIDFEFLNFEELKKLTFEKHLYLFQIYNKDFELDESLQEKGYNFKGEGQKNIHTKYFEALFLEENISRKSGAVFKLSGGGEVFFRKKSIKAKKEKRNSVEVIKNKRYTECKYFLHFPIQVNFKEEISGNFNQEINKFLANNPDINVIGIDRGEKHLAYFSVINQKGEILESGSFNKIENYNKNGEKLLFPEREIKEIHKDGSLIDLELVETGRKVDYVDYKLLLEYKERKRLLQRQSWKEVEQIKDLKKGYISALVRKIADLIIKHNAIVIFEDLNFRFKQIRGGIEKSIYQQLEKALIDKLNFLVNKNEINLEKAGSILKAYQLTVPVDSLKEIGKQTGVIFYTEAAYTSKIDPITGWRPNLYLKKNNSKINKENILKFDNIVFNSKENRFEFTYDLKKFFGKDSKFPAKTVNTVCSCVERFKWNRNLNNNKGGYIHYENLTDGKLANKEQKEDEFSNFKELFEKYFIDINGNILEQIKNLDTKNNEKFFSSFIDLFTLVCQIRNTNQNAKGDENDFILSPVEPFFDSRKSQNFGKSLPKNGDENGAFNIARKGLIILNRISENPEKPDLLIFNADWDNFARNI

SEQ ID NO: 96 - protein, 1329 aa, Unknown
  Description of Unknown: Cas12 sequence
MSNNFQEFTQKYALSKTLRFELKPVGKTKEILEKEMPMYQIINADKNIKAKYIQTKPFFDQLHRDFIKEAFENVELSGLSDFFENWKIYKQDKKANEKIYKKSAENLRKEVVSFLNAKGKDWAEKYHSSGLKKADIEILFEEGIFKVLEIRYGTDTNSFITNATTGEITSIFQGWKGFTGYFLKFWNTRENYYKTDGTSTAIATRIVDQNLPGYLENLEIFEKMKGKIDFESVRGDFSDFEKIGTVEYYSTCLLQEGIDGYNRIIGGYTYENGEKIKGINEIINLYRQTHKDEKVPFLKTLDKQIGSEKIAFMETIDTPEEFRKIFEEFVLKSSEKVVLLKQCLNHLFENELTDGVFLSKESLNTISHKWIDIGNMKLFHESLFTILKKEGAKYDSKEDEYKFPDFIRISDIKTALVKITTESFFWKNRYLYEKDENPTGFLTSDNSLWEGFIQIFSHEFSSLFERTEKDEEGKDIQWGYDISLLNIQKLLENNEYNPNDEKNKIIIKSFADDILRIYQMGKYFALEKKRQWNPDNLEIGEFYSHPEIGYDKFYFDSYKIIVQGYNDIRNYLTKNPWSEEKWKLNFENPTLANGWDKNKETDNSCIFLKRDNKFFLALMSRGNNQVFDERNIQKFAQNIEQGKYEKMVYKYMKDVALGIPKATTQLNAVQEHFFQSDKDYIITKGGSSIGEFIKPLRVTKRIFELNNRIYPKDNLGISFLRNQVNKKEQKNYIKIFQKEFITLGGDEVVYKKAVHDWIDFCKEYTKSYPSCAYFDYSGLKDTKEYSSIDEFYNDLDSFGYQISWQDISSSYIDELVESGKLYLFEIYNQDFSNGKTGAKNLHTLYFEHIFSKENQEVNFPLKLNGQAELFFRPKSIEAKGENRKFNREIIAKKRYTEDKIFFHVPLTLNRTEGDIYGFNTEINNFLAHNPDINIIGIDRGEKHLAYYSVIDQKGNIIESDSLNTVNEINYGEKLTDTAEKRKQARQDWQAVEGIKNLKKGYISAVVHKLTDLIIKYNAIVIFEDLNMRFKQIRGGIEKSVYQQLEKALIEKLNYLVEKGEINPEKAGHLLNAYQLTAPFETFKDMGKQTGIVFYTQAAYTSKIDPVTGWRPHLYLKYSSAEQVKKEIAKFSNIIWNNTEKRFDFMYDIRNFSTQKEYPKNNIWTVCSSVERYRWDKTLNQNKGDYVHYKSITPEFEKLFSDFQIDGTKNILEQINRMETKGNEKFFKSFIFFFGLICQIRNTNKADSDENKQDFILSPVVPFFDSRDSENTKNGLPRNGDENGAYNIARKGLIILQKINEFSDENGNCDKLGWKELSISQVDWDNYIKT

SEQ ID NO: 97 - protein, 841 aa, Unknown
  Description of Unknown: Cas12 sequence
MEYDEHISLIESEEKADEMKKRLDMYMNMYHWAKAFIVDEVLDRDEMFYSDIDDIYNILENIVPLYNRVRNYVTQKPYTSKKIKLNFQSPTLANGWSQSKEFDNNAIILIRDNKYYLAIFNAKNKPDKKIIQGNSDKKNDNDYKKMVYNLLPGANKMLPKVFLSKKGIETFKPSDYIISGYNAHKHIKTGENFDISFCRDLIDYFKNSIEKHAEWRKYEFKFSATDSYNDISEFYREVEMQGYRIDWTYISEADINKLDEEGKIYLFQIYNKDFAENSTGKENLHTMYFKNIFSEENLKNIVIKLNGQAELFYRKASVKNPVKHKKDSVLVNKTYKNQLDNGDVVRIPIPDDIYNEIYKMYNGYIKESDLSGAAKEYLDKVEVRTAQKEIVKDYRYTVDKYFIHTPITINYKVTARNNVNDMAVKYIAQNDDIHVIGIDRGERNLIYISVIDSHGNIVKQKSYNILNNYDYKKKLVEKEKTREYARKNWKSIGNIKELKEGYISGVVHEIAMLMVEYNAIIAMEDLNYGFKRGRFKVERQVYQKFESMLINKLNYFASKGKSVDEPGGLLKGYQLTYVPDNIKNLGKQCGVIFYVPAAFTSKIDPSTGFISAFNFKSISTNASRKQFFMQFDEIRYCAEKDMFSFGFDYNNFDTYNITMGKTQWTVYTNGERLQSEFNNARRTGKTKSINLTETIKLLLKDNEINYADGHDVRIDMEKMDEDKNSEFFAQLLSLYKLTVQMRNSYTEAEEQEKGISYDKIISPVINDEGEFFDSDNYKESDDKECKMPKDADANGAYCIALKGLYEVLKIKSEWTEDGFDRNCLKLPHAEWLDFIQNKRYE

SEQ ID NO: 98 - protein, 886 aa, Unknown
  Description of Unknown: Cas12 sequence
MFGNWGVIQNAVMQNIKRVAPARKHKESEEDYEKRIAGIFKKADSFSISYINDCLNEADPNNAYFVENYFATFGAVNTPTMQRENLFALVQNAYTEITALLHSDYPTEKNLAQDKANVAKIKALLDAIKSLQHFVKPLLGKGDESDKDERFYGELASLWAELDTMTPLYNMIRNYMTRKPYSQKKIKLNFENPQLLGGWDANKEKDYATIILRRNGLYYLAIMNKDSKKLLGKAMPSDGECYEKMVYKLLPGANKMLPKVFFAKSRMEDFKPSKELVEKYNNGTHKKGKNFNIQDCHNLIDYFKQSIDKHEDWSKFGFKFSDTSTYEDLSGFYREVEQQGYKLSFARVSVSYINQLVEEGKMYLFQIYNKDFSEYSKGTPNMHTLYWKALFDERNLADVVYKLNGQAEMFYRKKSIENTHPTHPANHPILNKNKDNNKKESLFEYDLIKDRRYTVDKFMFHVPITMNFKSSGSENINQDVKAYLCHADDMHIIGIDRGERHLLYLVVIDLQGNIKEQFSLNEIVNDYNGNTYHTNYHDLLDVREDERLKARQSWQTIENIKELKEGYLSQVIHKITQLMVKYHAIVVLEDLNMGFMRGRQKVEKQVYQKFEKMLIEKLNYLVDKKADASVSGGLLNAYQLTSKFDSFQKLGKQSGFLFYIPAWNTSKIDPVTGFVNLLDTRYQNVEKAKSFFSKFDAIRYNKDKEWFEFNLDYDKFGKKAEGTRTKWTLCTRGMRIDTFRNKEKNSQWDNQEVDLTAEMKSLLEHYYIDIHSNLKDAISAQTDKAFFTGLLHILKLTLQMRNSITGTETDYLVSPVVDENGIFYDSRSCGDELPENADANGAYNIARKGLMMIEQIKDAKDLDNLKFDISNKAWLNFAQQKPYKNG

SEQ ID NO: 99 - protein, 1228 aa, Unknown
  Description of Unknown: Cas12 sequence
MSNLYSNLHNLYQVQKTLRFELKPQGKTKENMEKVGILKADEHRAEIYSKVKKYCDEYHKLFIDKSLSNIELNGIDRYYELYSINNRDDKQKEELDQLEASLRKQISDAFKKSAEYKGLFQKDIITSYLVTMYKENQEKMQDIGEFNRFTTYFTGYNKNRENMYSEEDKSTAISYRLINENLPTFIDNIKIYKKIVSLMPEDIEKIYKDLEEYIQVDSIDEIFNISYYNDVLTQRGIECYNILISGRTKNDGDKIKGLNEYINEFNQTHNEKIPKLQELYKQILSDAESASFKIDVIKNDKELMNLIEVYYANILPILNKIEDLFTRISNYNLELILVNNDGTLSTLSNMVFNEWSYIKGAISEKYDEEYSGKEKYGTEKYAQKKQEYLKKQKIYSLKFLNDCIGNNAICEYLKNYIIQNKNIETIKEDYNEVQNIKVEDDTKELIKDEKSIEKIKKFLDDVKSLQEFVKLVIPKDRTVEKDAKFYSELTPYYEKIKEIIPLYNKVRNYVTQKPYSTEKIKLNFECPTLLKGWDANKEEANLGVILLKEGKYYLGIINPYCKKIFEVDEKDSNEQNNYKKMEYKLLPGPNKMLPKVFFSNSRIEEFNPSKELQEKYNKGYHKKGKDFDINFCHELIDFYKQSVNKHEDWKKFNFKFKDTSEYNDISEFYREVEKQGYKIEYTEYSEKYINELVDRGELYLFQIYNKDFSEYSKGKENLHTLYWKAVFDPDNIMNPVYKLNGNAEVFYRKKSLEMKVTHPANQPIANKNISTIEAGRSTSTFKYDLIKDKRYTMDKFQFHVPITMNFKSERLFNINQIVNKYLKYNDDIHVIGIDRGERNLLYVCVIDKNEKIVYQKSLNEIVSEYNNNRYTTDYHGLLDRKEKEREIAREDWKNIENIKELKEGYMSQVIHILVELMKKYNAIIVIEDLNKGFKNSRIKVEKQVYQKFEKMFIDKLNYLVFKDEDKMNEGGVLNAYQLTNKFESFTKLGKQSGILYYIPAWCTSKIDPTTGFINRFYLKYENFDKSKEFVNRIDDIRYNEKENLFEFDIDYSKFTDRLNDTKNKWTLCSYGERILTQKNANGEWLDRRIQLSIEFKKLFEKYGINLNNIKDSILKLDKDNLEFYKGNGESLGFIQLFKLMVQMRNSLTGKEEDNLISPVKNQHGKFFNTSEKIEGLPIDADANGAYNIARKGFMLVEQMKNVEDEKLNKIKYNITEKEWLNYVQNRGM

SEQ ID NO: 100 - protein, 1142 aa, Unknown
  Description of Unknown: Cas12 sequence
MARIFEDFKRLYPLSKTLRFEAKPIGATLDNIVKSGLLDEDEHRAESYVKVKKLIDEYHKVFIDRVLDNGCLPLKNEGHNNSLTEYYDSYVSKSQNEDAKKAFEENQQNLRSIIAKKLTEDKAYANLFGKNLIESYKDKTDKTKIIDSDLIQFINTAESTQLNSMSQDEAKELVKEFWGFTTYFVGFFDNCKNMYTAEEKSTGIAYRLINENLPKFIDNMEAFKKAIARPEIQANMEELYSNFSEYLNVESIQEMFLLDYYNMLLTQKQIDVYNAIIGGKTDDEHDVKIKGINEYINLYNQQHKDDKLPKLKALFKQILSDRNAISWLPEEFNSDQEVLNAIKDCYERLSENVLGDKVLKSLLGSLADYSLDGIFIRNDLQLTDISQKMFGNWGVIQNAIMQNIKRVAPARKHKESEEDYEKRIAGIFKKADSFSISYINDCLNEADPNNAYFVENYFATFGAVNTPTMQRENLFALVQNAYTEVASLLHSYYPAEKKLAQDKANVAKIKALLDAIKSLQHFVKPLLGKGDESDKDERFYGELASLWAELDTVTPLYNMIRNYITRKPYSQKKIKLNFENPQLLGGWDANKEKDYATIILRRNGLYYLAIMDKDSRKLLGKAMPSDGECYEKMVYKLLPGANKMLPKVFFAKSRMDDFKPSKELIEKYNNGTHKKGKNFDIQDCHNLIDYFKQSIDKHEDWSKFGFNFSDTSTYEDLSGFYREVEQQGYKLSFARVSVSYINQLVEEGKMYLFQIYNKDFSEYSKGTPNMHTLYWKALFDERNLADVVYKLNGQAEMFYRKKSIENTHPTHPANHPILNKNKDNKKKESLFEYDLIKDRRYTVDKFMFHVPITMNFKSVGSENINQGVKEYLHHADDMHIIGIDRGERHLLYLVVIDLQGNIKEQYSLNEIVNEYNGNTYHTNYHDLLDAREDERLKARQSWQTIENIKELKEGYLSQVIHKITQLMVKYHAIVVLEDLNMGFMRGRQKVEKQVYQKFEKMLIDKLNYLVDKKADASVSGGLLNAYQLTSKFDSFQKLGKQSGFLFYIPAWNTSKIDPVTGFVNLLDARYQNVEKAKAFFSKFDAIRYKRIRTGLSLISTMTSLVKKQKVQGLSGFYAPEECVLILSEIKKKTHNGIIRKLT

SEQ ID NO: 101 - protein, 1250 aa, Unknown
  Description of Unknown: Cas12 sequence
MISLNYFQNQYAVAKTLCLELRPIEKTMEYIISSGILKEDEHRNESYKLVKKIIDDYHKAYIELSLSRFELKITSCSKNDALEDFYCQYLANSQEEKDKNIFKKTQDNLRKQIAKHLTQGEAYKRIDKKELIQEDLLEFVAADPDAANKKILINEFRDFTTYFTGFYENRKNMYSEEAQSTAIAYRIIHENLPKFIDNMGTFKQLMQSSITDILPQIFDNFKKDLEVSSIQEIFDLNYFNKVLTQKQIDIYNAIIGGKSLNENSRIQGLNEYINLYNQQHKENKLPLLKLLFKQILSDRNSLSWLPEAFETDKQVLHAVRKCYANLKESVLHEAGLVQLLSSLPSYDSTRIYIRNDQALTTISQKLFGDWGIIPHAIKERLKKDISAKRKETEEAYLERIEKAFKQADSYTIAYINDSLKEIGVDKKNIEDYFIHLGAICTEGQEQENILQRIASAYSQAQPLLEEKVPVHKNLMQDKDSVELIKSLLDELKNLQHFIKPLLGKGSESDKDERFYGEFVGLWNELDQITTLYNKVRNYVTRKPYSIEKFKINFQNATLLKGWDRNKERDNTSIILRKNGLYYLAIMRKEYNKVFEKYPAGTEENCYEKMEYKLLPGANKMLPKVFFSKSRINEFNPSPQLLQNYQMGTHKKGDQFKKEDCHALIDFFKTSIEKHEDWKNFNFQFSPTSVYEDMSGFYREVEQQGYKLVFRSIDAEYIDKLVEEGKIFLFQIYNKDFSPFSKGTPNLHTLYWKMLFDERNLNNVVYKLNGEAEIFFRKKSITYTHPTHPAEIPIKNKNVQNKKKESVFQYDLIKNHRFTIDSFQFHVPITMNFKNAGLSNLNEQVYTYLRENKDAHIIGIDRGERHLLYLVVIDRYGRIVKQFSLNEIVNEYHGNTYTTNYHDLLDKREEARQQARQSWQSIENIKELKEGYLSQVVHKIANLMVEYHAIVVLEDLNIGFMRGRQKVEKQVYQKFEKMLIDKLNYLVDKKKAPEADGGLLKAFQLTNQFESFQKLGKQSGFLFYVPAWNTSKIDPCTGFTNLLDTRYENIAKAQKFFRTFDAIRYNAVKDYFELELDYDKFHKRAEGTQTKWTLCTYGTRIKTFRNPENNNQWDNVEINLTEEFKKLFKQFGINLSGDLQQAICAQTEKSFFESLLRLLKLTLQMRNSITGTDVDYLLSPVQNAEGYFYDSRKGDKSLPANADANGAYNIARKGLWVIQQIKQTPQGQKAKLSISNKEWLKFAQEKPYLKD

SEQ ID NO: 102 - protein, 1193 aa, Unknown
  Description of Unknown: Cas12 sequence
MKTFENFTNLYSLPRTLRFELKPLYKTKELIDSKQELFPKDKRIDEIYQNIIKPCLNELHSDFIEKSMENKDFQNIPDNILKIYSNEKNIDDFKNIEKDLIKQINWFLKSNKTFFAENYSDLLGKNSIDIIIKVFWEKIYKKDDSWKIFLYNDLLWKSYEELINIYFKWFSTYLSNFNKNRENLYDKKNEAKVWSVSGRTIWENFPRFLQNCINFRDKLEKLNLSIEQKDIFITNNFWKCISQKQIDYYNKIIWQINSKTNEFNQKNGLKWNKKLPKLLLLHKQILWKSENENILNFINNIIQTDFELEQEIKIINKDIFQRIDFIKKSIVSNIEDFELEKIFIKKNRLKDISSLLMDNYSVLEKLLPEFNEEWKIIKENELVNLSKIKKSFENIDLKDLKNIFKKEYFDESKDWFKLFLNWIYNHFSDLENNIKHTHKLVQDKLISWNFSENIQKSEKNINLRDEIFVSSKWLLKAYLDSILALDRFVHMFDYWEQKDFDSNFYNNIEEYSINFSPFKTYNAVRNYLTKKNYSTDKIKLNFDYPDFLGSNSLWKYAFIYKDSKWFYYLWVLDHSNSQSKYKPQILKNNTEFYQLEYKQIKFNTLAWKWYIRDFWVKYSEDENCIINLKTLIKKQYLERYPVLKEIVDFQTDDKKIFDAKVKTILEQAYSINFVNIDKNYILEENNNWNLHFFQIYNKDFSENKKINSMENLHTMYFKALFEKENFNWWACFKLNSQWAEIFFREKSINEKKVKDLKTRNENAIEKKRYTENKVFLHLPITLNFINKWYSKYSFWYINDSVKKYIKENKISIIWIDRWEKNLIYFSMINENLEIIELKSLNSLILKVSDLEEKEVNYFEKLSKKEWNRNKERKDWDEIETIKELKEWYISQIVDNLVKLIVKHNAIVVMEDLNSGFKRWRQKIEKQIYQKFELALAKKLNFTVDKNKKHDELWWIYKAYQLTPQIENFQDIYSQTWIIFYTQAAYTSVTCPNCSFRKNIYQKYENESKFKEFFKKYILEIKFEDNCFIIKYKIDEKIDKKKNKLKKLEFQVNTKNQIRLKFEKSLKWKWWETKEFNITEKFKEIFEKHKLDLWNLKEELLAWNWEIQLYKDFMFYFNLLLQLRNSKENDNWWYISCPSCWFHSGNWFQWFSYNWDANWAYNIARKWRIILDKIKKDEKNLWITNVEWDNYYQK

SEQ ID NO: 103 - protein, 1202 aa, Unknown
  Description of Unknown: Cas12 sequence
MAVRSVKLKLLVPRDGSAESVRKRKALWATHQFVNDAAAAYAELLLEMRQEDVCRGTDDHGKDVIEPAAHWQAKLRARLAAKQLPPVAVAEALPLLKAFYGSRLIKSFVANDKGVAGTGNATDLNTWLSGLVDPASVAGEKTELRKQLLAELPLCEAADADFEGAARKMLAKSDAREALLEGPGTGVGWPAAYNANPTDSVWLDMLHKAAAKARLELADTTVSELKKLGVFPLLQAASSNRVFGSGVLNPFERMAAAQAAAALLPWETKRHEMRKRRDKFADQLNQWDTEFGASHATALAAIRAFEAEESERARRESLGNEGTGYRIGGRELRDAWTLLRDWLKGHSTATAAAREDKVRELQAKQGRSFGSHRLLSWLAKPAQQWLADHSAGDVVTRIAVRNARQRKLDTARTLPIWTGADAVKHPRFANFDPPNNTNQPGFDLRAGTQKGRLTLRLSLLTERADGLLLAQDHDFQLVPSRQMAEIVLHKDGKERALSWQSQDGIGRQVGDVGGSALLFSRDHAECLLERKQITRLERGAWPAALPVWFKLSLDIGAEHKALLKQRFKWGVWLNSALVTRNAKDAKGVPPPVGTRVLAVDLGLRSAATVSVWQVVDAATPVVAGKWRVPLSDTLSAVHERSAMLALPGEHVDAGVLAARRAANEKLAGLLAATSHLSTVFKLGRAEQGDRRRELLERLGEGDDRRARAAVATTAAERDGLRAVLGATQDAWAGAVAAVWRRLETDLAGAIAAYRKQQREDVQLRREARHGPGASQLPKQAAAERLLGGKSAWQIEYKERVRKLLTRWIMRQRPGDTAVRRLARKDLGKYCGGLLDHLTALKEDRAKTTADLIVQAARGRVRAHKDAHGRQQDRELWLAKYAPCDLIVMEDLGRYRFATDRPPSENRQLMQWTHREVFRLVQMQAEVEGIQVLETGAEFSSKFDARTWAPGVRCEPITKLWVERYRNGEMPWLADKADEWRREGIELAQLVPGQLLPTGSGEQFVAVSATGGLRVRHADLNAAQCIALRALTGHGTAFRLTARRLGDVFVSAKGLGKRPQGALWREFGSALPPAVVVLRPAGEVRYALRPFASARDAAAALGLQLGALRNVDATDAESDAEDGDLAELLAGADPDRATFFRDPSGDVHGGAWVQAKVFWAEVRRHVRLGLQAQGLLPAAARSSEPRQMQLPLAGALPGDDIPL

SEQ ID NO: 104 - protein, 669 aa, Unknown
  Description of Unknown: Cas12 sequence
MLDKFASLYPVTKTLRFRLLPQGRTEENMQVAKVLENDLERSEAAAVVKGLIKKYHLQFISDTLSGSTLSWQALTETLDKFKADHTATAELDSALAAYRCKLAELFTKSPKYKVMATPVSIIKEILKTETDPENIAALNKLNGYTYIIFDYVSTRMLTYSADAKATSLAYRLVDENYLRFYQDISAAAEISAVLEEAGFDNAEVEAFIRTDYNTCLTSEGIASFNAAAGSINQFVNVLLQQNPVLQSEPALRRHLQPLYKMLLDEAESKIIKFEDYGQLRDAVENFRRNFQDLPQSLIDIFAGRYDYSKIYVGYKYLNEASSQIAGGYNWKLLENALEDFYSKPYLVNGKLPVKYKTVVNKKMNQLAYSFTELQEALDAGDSGSSITDLFGKYAELHAAYAAADGNVFYKEYDRKSIASLKNYLDAVNAIARFIKIFAAPEVYVKDEGFYGIVDGAADKLRDFDLLYNMVRNYITKKPYKKSKVALTFNSSSFGRGWDENKIYDELTTIFTYNGKYYLGVINKNDKPDLAAAVSKDEGGYKRMVYKTFDIVKQLPRLSFTKAVKAHFAESDEDFIFDGPKFAKPLRVPKEIYLQSFTDNGDKLADSAKKYTKAYLDMSGDYKGYYEAIIKRIDYTKEFLSAYKSTSIYDLAFLKPAGKAAGSLCWTRHI

SEQ ID NO: 105 - protein, 1193 aa, Unknown; identical to SEQ ID NO: 102
  Description of Unknown: Cas12 sequence

SEQ ID NO: 106 - protein, 1583 aa, Unknown
  Description of Unknown: Cas12 sequence
MSFLVPHLPTVVSHRLGGYSSAMDQTPTRLTPAVKNTAAATPKPEVPLTQRAYTLRLRGANDGDQSWREAVWATHEAVNMGAKVFGDWLLTLRGGLDRELADAKVKAGNNNPDRNPTPEERRGRRVLLALSWLSVESAPKKGDAYEKFVIASGKKDSQSIRDEKVVRALREILAKRGVANQDLEGWIVDCEPSLSAAIRDDAVWVNRSAAFDAAQCRVGTSLTREEIWDLLKPFFGSCESYLASLTTDEDSDTEAAATDDKAKDLVQKAGQWLSSRFGTGKGADFAAMSKVYSETAFWAGRASPFRSGAEALRLIAESLKSFCPKSFDADGILGLISGPGYKSATRNIIKAWSKRAGPVTADDLANLSAVAAEDANKCSANTGSKGHRPWSDAILCEVENACGFTYLQPDGPALHSEFAVMLDHAARRVSIGHSWIKRAEAERDRFTKDALRIKEVPDPIRVCLDRFCADRAGTSGAIDGYRIRKRAVSAWKEVITRWGQAACKTAEDRVIAVRETQADPDIDKFGDIQLFEALAVDDAECVWRVNGEVTPQPLIDYAAATDAEAKQKRFKVPAYRHPDPLSHPVFCDFGNSRWKIRFAAHDAVTKLANARTSLDRREADLAKAKERLDKATAPEEQTEGKESLEEAERHLRDARDRVAWLSSMHAFSMRLWGAGRVGDGQRLFWSCKRLTDDMALRQNSGQAPTIAVTRADRLGRAAAGADTADSVDILGVFTEEHWNGRLQAPRAQLDVIAAHVAKNQWDAKAKKMRDRIRWLVSFSAKLQPVGPWIEYSATFPEAALAKPFVSRKGEYAVRHVSNDDRAGLGKLVLSRLPGLRVLSVDLGHRYAAACAVWETVSIAQTNAACDAAGHELPTESDLFLQLSTTDLTGKNRTTIYRRIGADMITDPKTGEKTPHPAPWARLERQFLVKLPGEDIPARKASPAEFDAIRRLEEAFGRTRTADDPLLVRVDELLAATVDSARLALRRHGDAARIAYAFKPSAEKLTPGGGREVMSPEARKAMILDALLLWHGLWHGDRWADVWASQQWDAYIKPELGMDLPPWSETSGEPRCQYRSKVEGLLKRVAESLAARDGAGLHLLWAEQWRTRNAKWLGNTGHLRTLRSLLLPRGLTTSTPAAWNVGGLSLTRIATLKSLYQLHKAYHMRPEPEDPRKNVPAKGEEELRDFGRGMLDVMERLREQRVKQLASRLAEAALGIGRMKASEGKRDRKRPRAQIDQPCHAVVIENLKNYRPEETRTRRENRQLMSWSSSKVKKYLSEACQLNGLHLREVQASYTSRQDSRTGAPGIRCADVPVQDFFTKPWWRRQVSIAVGRVNQGRGDARERFLADLDAKWSAAEKSERITAPPLRIPVNGGELFVSADLHSPAALGLQADLNAAANIGLKALLDPDWPGKWWFVPASLDADGWRVPAAKSCAGAEWVKNWKVGQLGDSYAPNGKPLQPTDDEGVKKAEDGVKLAKASLDDAEQALKAAKKTKRKAEIDVASARAQEAKKNVDDMKKALVAAKKGASAKEIINLWRDPVGVDPADFASGEPWRAYTVYKQRVEYHVINDVLRGRAGPRSDRP

SEQ ID NO: 107 - protein, 1254 aa, Unknown; identical to SEQ ID NO: 36
  Description of Unknown: Cas12 sequence

SEQ ID NO: 108 - protein, 1468 aa, Unknown; identical to SEQ ID NO: 34
  Description of Unknown: Cas12 sequence

SEQ ID NO: 109 - protein, 669 aa, Unknown; identical to SEQ ID NO: 104
  Description of Unknown: Cas12 sequence

SEQ ID NO: 110 - protein, 677 aa, Unknown
  Description of Unknown: Cas12 sequence
  MOD_RES (19)..(339): Any amino acid
MCIRDRDLAVAALNRGDAXXXXXXXXXXXXXXXXXXXXXXXXXXXXXXXXXXXXXXXXXXXXXXXXXXXXXXXXXXXXXXXXXXXXXXXXXXXXXXXXXXXXXXXXXXXXXXXXXXXXXXXXXXXXXXXXXXXXXXXXXXXXXXXXXXXXXXXXXXXXXXXXXXXXXXXXXXXXXXXXXXXXXXXXXXXXXXXXXXXXXXXXXXXXXXXXXXXXXXXXXXXXXXXXXXXXXXXXXXXXXXXXXXXXXXXXXXXXXXXXXXXXXXXXXXXXXXXXXXXXXXXXXXXXXXXXXXXXXXXXXXXXXXXXXXXXXXXXXXXXXXXXXXXXXXXXXXXXXXXXXGQLNAIRNFLASDGYGAHDLVPVNYNGSNDRGAEVQVGNQKNWTVTSSAPVVVQYNNADTTLTVQGHTDRLIVTGSGNDTITLKDSGDDKVLLGDGNNTVVAGSGADTIVGGAGNDVLIGTNGGYGTELLGGAGNDVLRNAGSHGIYMDGGAGNDTFYGGTGPDTMEGGDGNDLMYANGRGSSIDGGAGNDTIYGGPGGDTLTGGDGNDLLRSDSAFGTKGSGNLLVGGAGNDTLWAGAGYDTLKAGSGSDTLISGTGSSQMIGGSSGNTTFEVAYHTGNDTITGSGSGNTVYLDGRDFSDATISNHSGVTTVSFSDGQVLKISGVQDIVFSDHDYKV

SEQ ID NO: 111 - protein, 1254 aa, Unknown; identical to SEQ ID NO: 36
  Description of Unknown: Cas12 sequence

SEQ ID NO: 112 - protein, 767 aa, Unknown
  Description of Unknown: Cas12 sequence
MAQASSTPAVSPRPRPRYREERTLVRKLLPRPGQSKQEFRENVKKLRKAFLQFNADVSGVCQWAIQFRPRYGKPAEPTETFWKFFLEPETSLPPNDSRSPEFRRLQAFEAAAGINGAAALDDPAFTNELRDSILAVASRPKTKEAQRLFSRLKDYQPAHRMILAKVAAEWIESRYRRAHQNWERNYEEWKKEKQEWEQNHPELTPEIREAFNQIFQQLEVKEKRVRICPAARLLQNKDNCQYAGKNKHSVLCNQFNEFKKNHLQGKAIKFFYKDAEKYLRCGLQSLKPNVQGPFREDWNKYLRYMNLKEETLRGKNGGRLPHCKNLGQECEFNPHTALCKQYQQQLSSRPDLVQHDELYRKWRREYWREPRKPVFRYPSVKRHSIAKIFGENYFQADFKNSVVGLRLDSMPAGQYLEFAFAPWPRNYRPQPGETEISSVHLHFVGTRPRIGFRFRVPHKRSRFDCTQEELDELRSRTFPRKAQDQKFLEAARKRLLETFPGNAEQELRLLAVDLGTDSARAAFFIGKTFQQAFPLKIVKIEKLYEQWPNQKQAGDRRDASSKQPRPGLSRDHVGRHLQKMRAQASEIAQKRQELTGTPAPETTTDQAAKKATLQPFDLRGLTVHTARMIRDWARLNARQIIQLAEENQVDLIVLESLRGFRPPGYENLDQEKKRRVAFFAHGRIRRKVTEKAVERGMRVVTVPYLASSKVCAECRKKQKDNKQWEKNKKRGLFKCEGCGSQAQVDENAARVLGRVFWGEIELPTAIP

SEQ ID NO: 113 - protein, 1210 aa, Unknown
  Description of Unknown: Cas12 sequence
MNIIMENFEKFVNLYELSKTLRFELIPFSQTKVELEKDWIIEKDREIEEKYHIIKEKLDTLHIKFVWQALEWVDLSLLEEYAELYFACKKDTKNKKLKSKFEKLEKKIRQEITSFFDAEWNKWKEKYGFLKKWWTSFLTEKEILDVLIDIFPENKDDFEIFKWFFTYFSNFNESRKNFYKDEWKAGQIATRAIDENLTTFLENIIKYKNFKKENPDFFTENEEKVFELDFYNFCLTQKWIDNYNEIIWAKSLEEWKNTQGVNQRINLLKQKNEKSNKKNLSYPKFDILYKQILSEKSENDFIPNIENTEELFTVIQKSIKENDKKITEIDKLFKKFFLEENNIDIWKVYISKQAVNTISSKYFENWSSLWWYLWENSKKKYFSLWEIKEALEDIKEKNIFKGEYYNNKIAFENKSNFENFLAIFYYEFQTNLSLLNWNQNNLESLQEKEFKKEEKQVDIIKKYFDSVMDLYAMSKYFFVDLKQAKNFPKDIEFYNDFDLYFSDYEPWKVYNLVRNFLTKKEVKTDKFKLNFSNSQFLTGWDKDKEKERFWVILRKNEKYFLAILKKNNNKIFENYRENNPTDFYEKMEYKQLNNVYRQIPRLGFPLQKKLDSLKWKELEEYLEKYKNNFWYNKEIAFIKEEFDIFQKNKEKWEKFDREKLKKLIDYYKKVVLEKYSDLYDLKKLENTDYDELVNFYDDVEKSMYSLHFTKIETEFLENLEKNWEIYLFQIYNKDFSDYKKENTKENIHTKYFKHLFSEENLENLKIKLSGWAEIFFRDKTHNLKQKLDKNWKKMFYWENKDKKVLEHRRYAKDSYGFHISITLWANNWDMYKFNQFFNKNFTPKHIIGIDRWEKHLAYYSVIDLEGNLVETDTLNIVNGINYLEKLENIEKSRMQERKSWWEIENIKNLKDGYISAVVSKLTELIEKYQAIIVFEDLNLGFKRWREKIERQVYQKLELALAKKLNYLTFKNKKDCEIWGVLNGIQLVPRVKDYQDIANYKQSGIIFYTNPAYTSTTCPECGWRKTLKFPSKITKTSILEFFKEIQMSFYWEKFSFTYENILWKSETLFSNVKRTQWNNKSRKIEHKENITQELKSVFEKYNINLWENISEKLQQTDMLLEDLKVLFYNFKLINNIRNSDSKLEEDIISCPCCLFNSENWFKGAYFNGDANGAYNTARKGIIMLENIKVNPERSNLFVRNEEWDEFLREEF

SEQ ID NO: 114 - protein, 1187 aa, Unknown
  Description of Unknown: Cas12 sequence
MSKLFENMTNLYSLNKTLRFELKPVGNTRELIESKDFFKNDEEKAENYQFMKEKMDKIHRNYIQKSLETIKMLPILDQTEQKRLKKEDIKNELKSLRSFISAAFVSVKDLLSNKIIEWLISEASIEEKEKIKKFDKFFGYFKTYVQNRGNLYKAEDKAGQIAFRLIDENLPRFFKAKQIIEEIIKKTPDFVVKERNEKQEETEKKITEYLSIFYLNSYCHYLSQSGIDLFNEIVGHINLSINLYKQKTGVKFSLIPLLYKLPLAPRKQISRLPKQIENPEELELIVKSVLDRIDQKINPFINNILQTVLEENSVYDLNWIYISIKTTEQWWSIGLSGRNSLRELGYNQSKNWEEPVLKAEKNKFPFISLGEIKSFLDAKQLAWDDIKSVFWEGKSQSLMNWSWSNIFFHLIGKEISSLIEKYLHSRKNYQISQSKENQKHVLDNSLSLWRLLGWFVLMHKKTHLTPEIKESFFYDWENGLDAIVFDENSDPIHTIYDKVRNCLTKKPYSNKDKIKVNFDCPYLLWGWDQNYDAFGWLIFHDWKKYFLWLIKGSWLNMEEKNKLYEWINPMNSITKIIYDYQKPDFKNVPRLFIRSKWDTFAPMVREYWLPVNDILYLYDNELYKPDKKNPWKHKSYLRRLIDYFKLWLSKHKSFKHYIFKRKESDQYENLAEFYSDVEFSCYAIKKEKVNFDQVKALCESERLYLFEIYNKDYNQFSKWKNKNLHTQYFEALFEERDNNLFMLSGGWSIFWRESNWKIVEKIRSYSPKYNIEIIDKRRYTKNKLMIHIPIVLNFCRNQEWRVNDMIKSLIQSQSNNFTILGIDRWEKHLLYYSLIRQDWTIIKTGSRNTITNKIKIVDYHKKLDDREKKRDEAQANWEQQEQIKDLKKWYISQVINEISKMIIEHNAIIVLEDLNGWFKRWRQKVEKSIYQQFELALAKKLNHLVFKNRWDTESWGTMKAYQLTPLVAQFQDLSFQTWVVFYTPAWYTSTTCPCCGWRKNIYFKYENEKQAKIELEKLNIVRENNYFSITYTAEWWNKKWKITWSVLNKTDRILTTKWQTRLQYDRASKNTKEYDITTDFNSVFTAKFLDYKIRLENAGSKQCRNLINSINLLLKIRNAKSGTDIDTIQCPACEFHSQWWFQWNEFNWDANWAYNIARKGKVIIDKIVKGEKNTTVSQIEFDNEIQK

SEQ ID NO: 115 - protein, 938 aa, Unknown
  Description of Unknown: Cas12 sequence
PAYRHPDPLLHPVFCDFGCSRWQICFDVRKNVRTTSPRRLCLTLFTGSGMELVPFSWQSKRLARDLALEQRHRNPEASEVTRADRLGRAAAGVSAGGAVSIKNIFNEENWNGRLQAPRSQLAAIAARVDKHGWDAKALRMLDRLRWLITFSPRLEPTGPWIEYALRIPDDAAAKPFLSRKNGFAVLHRSNDDRKGLAKLILSRLPGLRVLSVDLGHRYAAACAVWETLSADQVREACQAAGHDGPTECDLYLHLKKDGRTVIYRRIGADTLSDGTPHPAPWARLDRQFLIKLQGEEHKAREASNAEIWAVHQMEAALGRSVPLIDRLVASGWGQRTEGQRARLEALKQLGWRPVAEKLDSDDEPGVMEESPAIKPSLSIDELMSSAVRTMRLALKRHGDRARIAHYLITDEKTKPGNVKEQLDENGRIELLQDALVLWHDLFSSKGWQDNKAKELWYVHIATLPEYKAFQSSGEGHAGPERRGKPEEDREKLGVVAQALAPNVTLREALHNAWKKRWEEDDARWKALLRWCKDWILPRGEAANSPAIRKVGGLSLIRLATLTEFRRKVQVGFFARLRPDGKKAETGEKFGRKTLDALEELREQRVKQLASRIAEAALGIGKEHVFPTAKEPQKKCWCGSVHRKKDPKRPRERVHSPCHAVVIENLTHYRPEETRTRRENRQLMSWSSGKVKKYLAEACQLNGLHLREVNAAYTSRQDSRTGAPGIRCQDVPVKEFMRSPFWREQVAQAKKKQAEGKGDARERFLCDLDEQWKNRSEDEWKKAGPVRVPLRGGEIFVSADGTSPTAKGLHADLNAAANIGLCALTDPDWPGRWWYVPCDPASFKPIMDKVEGSAAVQPDQALRQPAQAQRGDAARDRKKRGKVGGRSREVVNLWRDVSSRPISPNDSWQEFTPYWNDVQARVVNILRQSAGLTRGQGEP

SEQ ID NO: 116 - protein, 1140 aa, Unknown
  Description of Unknown: Cas12 sequence
MPLRSINIKMRLKRAAEGRALRQSLWLTHSVVNCAVAEIERVLLLCRGRGYWTGDDEPVSAETVQQQALAFARETQARNGQPGIGGDAEILAALRGLYEAIVPSVNRDEQGRPLEGNAQAAGGFAGPMMDAESEGFQSVFDKILEPLPSWVAKMTGGTRGWEQESVQWLKSPESERLQHASGSPPAWVRRLRTGEPWQEAFVQDQENKRKEVKGVPSLIQRLKKELGLLPLMRPPITLQFEDKRSGLTPWDRLTLRLAVAHLLSWESWNHRAADEHGRVTERLARLETEAAPLASLIEGLREYEKIRHEELKRVAQANDENPFRIGARGVRGWDRVREAWLGATDDTKEGRFTSVAALQTKLGGRFGDPDLFRWLAEEGREHLWGEHDPLPILARLNALSRLLRRKKDHAIYTAPDARLHPRWTAYEAPGGGNLRNYSFEISGNDLALRLPLLRRVESGLEEDSQRAEIALAPSGQFQSASWKGDGKPNRHLTYYSAHEQFSAELGGAEILYRRRHLENRKVKELEQGDIGPVWLKLVLDVQPNAPEGWFTPRGRVVTPPTVHHFNTALVNRSKHAPDLVPGLRVLAVDLGVRTFAACSVFELVQGEPGNGMAFLADQERDLWARHERSFLLPLPGEAVDSQLLAARRAAYNQLGLLRRDLGRLKGILRLSVKETAENRCGSLEELLASLEDEWNRGNAPAIDVAALLSAKGCLEMPQPAWEAAIAGTYQAAERELGNRVRDWRRTTRPRTTGEDDRRQRRGYSGGKSAWAVEYLDQVRRLLQGWSLHGRSYAQIRRLDREKMGTFAAGLLDHINALKQDRVKTGSDLIVQAARGYLPTGKKGWIKQYEPCRLILFEDLARYRFRTDRPRRENARLMRWNHRQILTETELQAEIFGLLIGTTGAGFSSRFHARSGAPGCRTRLLTAEDLRSPTLAKQLELLAETQGIDPKCFRPGMQIPWDSGADFVTLDSEGKLVQIHADVNAAQNLQRRFWTRFRDAYRISAVEIKQDGRTSWYPDREGVRLRGALSTIVGGDGYARLVAADDDDGFVLEKVTRPHWRRAAGAQAESGDDVGLDEVALEMAEAMDTDLERGEGRLVFFRDPSGSVIRADRWYQAKAFWGQVRSRVTRALGLRRPGASS

SEQ ID NO: 117 - protein, 669 aa, Unknown; identical to SEQ ID NO: 104
  Description of Unknown: Cas12 sequence

SEQ ID NO: 118 - protein, 1236 aa, Unknown
  Description of Unknown: Cas12 sequence
MSRSIFSPFTNLYPIQKTLRRELKPLNENFQHDPALSALRNSEIPQRDEQREKDYQAIKPLLDEFHNQFITESLHSLEPQDRSDFILFYQTYQKKKKNKAEISEKELKSLDEEFESRTKALRNAIGTSFSVTAELRKSNPDYVSEKGKPFLTQKSYKILTEAGVLWLLEKKYTSDPEKLALIRRFGNFFTYFTGFNQNRENYYATDEKSTAVAYRAINENLLTFANNCELFEKLSVLSLSELEKKTFNPDSYSEYLTQSGIVFYNEMLANIRSKANLYTQEHKAKLPQPKLLYKQIWSPRGDTIPFDLIASEAEFQETLHTMIRETDQRIPEFNKLLEQIFEEKVDLSQIFFSKTSLNIISNRYFSSWHTLLEKGVELKLFKFKKNDEESFKLPAYLSLAELKELLESAPFQMAEKADADEEKHHQASLFKLQRENLHLEKSHSNWELLLKSMKSDFESFWTWEGEFWSYTLAKKALQSLSALESTNQEHKNLIKMLLDNALYAYRMLKWFKVDTSKLGFVPEGEFYPSLDQLLQDYPLPKWYDMIRNYLTRKTYSQAKLKLNFDCSTLLNGRDKNKEIQNLSVILRKDGKFYLAIMKKDQNKFFENSALYEGNLGTMEKMDYKLLPWANKMLPKCLMPGSDKKKYGASDQVLELYAKGSFKKSEKSFNLADLHTLIDFYKLALPKYEDWKVFNFQFQATENYQDISQFYREVEQQGYLLNWRKVNEKLIKQGIKDWSLFLFQISSKDFEGKSKTPDLQTLYWQQLFEFSTNVKLNGEAEIFFRPWSMKKEKKKLKVDNYDVFKHKRYTEDKILFHVPITLWFGNNEVSPSAPSKFNQKLNQELIIPHFDDLHVIGVDRWEKHLAFYSVVSVKTGKIVKQGTLNLLNGTDYEAKLSQKAENRLHARQNRDTIEKIADLKNGYISQVVNKLVELVLEYNAVIVFEDLNAGFKRGRQKIEQSVYQKLELALAKKLNFIVKKEKAVGEPWSVTSAYQLAPQINTFWDIKWKQRGIMLYTRANYTSVTDPLTGWRKQYYFKKGSSEEMKAQFFKSFKNLTRDAGQEAYIFDDGTWLLYSNVERRRGKRGDHRERTQIKYDPSLELDTLFSKYQIEKSDSLFDQLKNRELPQTFWTSFFRIIDLIMQIRNTDDEGRDIILSPIGNPQERFDSRKRYNQLPRDEKGGIIEESAFEYPTSWDANGAYNIARKGVMMLERIKENPEKPDLLIRDAEWDKKITRK

SEQ ID NO: 119 - protein, 1333 aa, Unknown; identical to SEQ ID NO: 56
  Description of Unknown: Cas12 sequence

SEQ ID NO: 120 - protein, 926 aa, Unknown
  Description of Unknown: Cas12 sequence
RPGASAALSLTPLKTLFSENFSSFMCGNWQIINDSLKTYYNENIKSKGKAKEEKVKKAIKAIEYKSLADINQLVERYNNDELNRKAEEYISAINEKIKDLDVNEIEYDEKINLIENETKSEEIKSKLDSIMEIMHWTKMFIIEEEIEKDVNFYNEIEEIYDELQPLVTIYNRIRNYVTQKPYSEEKIKLNFGIPTLANGWSKTKEYDNNAIIMIRDGKYYLGIFNAKNKPDKKIMEGHQSEENGDYKKMIYRLLPGPNKMLPKVFMSKTGIAEYKPSQYILECYEQNKHIKSDKNFDIKFCRDLIDFFKTSINRHPEWSKFNFKFSETSEYEDISTFYREVEKQGYKIEWTYISEKEIKELDENGQLYLFQIYNKDFSEKSKGKENLHTMYLKNLFSEENLKNIVLKLNGEAEVFFRKSSIKKPIIHKKGSVLVNKTYNENGERKSIPEEQYTEIYKYLNSIGTNELSEKSKKLMEEGKVEYYKANYDIVKDYRYSVDKFFIHLPMTINFKAAGFSPINNIALKNIALKDDMHIIGIDRGERNLIYVSVIDTKGNIVEQRNFNIVNGIDYKEKLKQKELDRDNARKNWKEIGKIKDLKEGYLSLVVHEIAKLVVKYNAIITMEDLNQGFKRGRFKVERQVYQKFETMLINKLNYLVDKDLAVDQEGGLLRGYQLTYIPESLKVLGRQCGYIFYVPAAYTSKIDPTTGFVAIFNYKGMTDKDFVTSFDSIKYDDERGLFAFEFDYENFVTHKVEMARNKWTVYTYGERIKRKFKNGSWDTAEKVDLTYQMRSILEKYEIEYNKGQDILEQIEELDEKAQNGICKEIKYLVKDIVQMRNSLPDNAAEDYDAIISPVINNNGEFFDSTRGDEDKPLDADANGAYCIALKGLYEVMQIKKNWNEETEFPRKELKIRHQDWLDFIQNKRYL

SEQ ID NO: 121 - protein, 1466 aa, Unknown
  Description of Unknown: Cas12 sequence
MQCGSLRHNSKSLDSALAYPARLTTGGNEGKTSEAHIENDSLPEITRRPSRLARDFAPSNPFPFMKRIYQGQITGMQFHGAAGEQAVPANQNWEQALWDHHGLFHDAVNYYLVCLLALARPGNPVYAIREKLDAHNGAEPDELMVWRTFRRRGCNRPGLRDSVAKYLTPGNDEPTTEECFAAVLAGNPLGATEEGRAILNEGLAQLLGKCTGESGCRNSAKEYLPRFTKPDFKGNFEEDTARLNRAEASKRLPFYLHDPATTPNSPALDEFGVLSIALPNPKRAELTGAEARDKLLEFSREWSARLPDGSADWRRLEAKITALGDSLAIPGYTSGSAKGENRFQLYAMFLFCFVEKSDFTLGLLRQTTRRPVEGEEPPPRSNHSATAGDPIRIARGGRGYVFRAFTSLKQWGGDTGGDLKWPKFDMAAFCEALKALHQVEAKAKQRAEERSKKQALLDYQRGRIRRFKPTANSEDATPPPVLAGDPRISRLEQLLNTDLQDEYEMSEGVAVAYGLHPRTIRGFREIRKRWISAVGNAPFSEAARATLIACVRSFQSENPGTVGSARLFEALAEESNWIIWREPSAAEQQSWRENADLPESAEFALDPLQALTDERELKDEIERLSGPIRFTPADAEHSRRQFYFSDVSQIDKRNRFRPRLNEVEVELAVRPNGHWTNVWVTLQYSAPRLLRDQLPTADEAGGGWQQAMMAALNLRAPLKKGGEAVSFADCAALSLMPDISPDGEKRLLLNFPVELDGEAIANQLGRSKRWETLQFGGADDESYWLRWPKTWIDETKVRRKAAPPKWWLSKEPFSVLGVDLGQRDAAACALVQVSPGNCPTGVCRHVGSADGVDWWATVRSMNMLRLPGENAKVMRDGRFQEELSGSRGRSASIDELKEAGDICARLGFVADTILGANGRALSFPELNDRLLFSLRSAQSRLARLQSWSCVAHADVPPARREGILRDISEAKDDPLGLKPLATAGNLEAIASTLREVILQERTSISAQLVRVADRILPLRGRRWEWVARPESPSNHMLRATAPDTDPRRKLVAGQRGLSLARVEQLESLRQRCQSLNRALMQVPGTPSKLGRRSRGVELPDPCPDLLDRLDALKEQRVNQTAHLILAQALGVRLRIHQVSGPQRTRSDSHGEYERIPGREPVDFLVLENLDRYLASQGRSRSENSRLMKWCHRAILLKLKQLCEPYGLRVLETPAAYSSKFSSRDGTAGFRAVEVTPDDLGSHRWRKHSERLADPGASLSRDEREESTRLMAFAERLKALNQDLIARQEAARSSNQPFRPKWRTLLAPQQLGPIFVPAVGKPLQADINAAINIALRAIASPDVDDIHLRIRAARSGDKFVVRAENTRERARWGSAEAEIGLPTGAGAKEIEERRSLLTEARVNFFFDPASVAAFDHGKVRDAKLAVTSGRGLWGTLRREEWAIVGKINNDRLAAHGLGRPFAERVDL

SEQ ID NO: 122 - protein, 1464 aa, Unknown
  Description of Unknown: Cas12 sequence
MSQRDPLPSPTPRAYTLRLSTPDADNGAWRERLWKTHEVVNSGAEAFGDWLLSLRGGLDHRLVAVKVRVGRGASKTEREPTEDERRERRIVLALCWLSVESKKGAPQGRVVEDPVDALKRILGQRGLSEADAEQWVFDCRDSLSATIRDDATWVDRSAAFDETVQRLGSSLTREHAEQVIIEFFGDIHDYLALPKNMEEDGVTSPRGGSGKEFRTQARSWLSENWGAGQKGDKAQIVDALRKCSRCIAQEKPSTGSDLLRVLVRSLGGSPEETLRFDELRKLVGWRTGRRSTGAFALQRTVDMDRLSESDLESLEAKLTVEIDAKSPEASRSVPQWVESMRTAVEREVGMPFRSTRDLIGEFGVMLDHAARRVSATHSWIKRAEAERRKFEGDAAKLAQIPEEARQWLDQFCEDRSQELNALEPYRIRRRAVEGWESVVRTWAKADCKAEGDRVKAVRALQPEIEKFGDAALFEALAAEDALCVWLLDGKATPRPLLDYSAATDAQYRKRRFKVPAYRHPDALLHPVFCDFGESRWTIEFSAHRALGRRRKAQQLVDNKTVALQKAQERLRKAKAESSRSRAEEKVRAAEHALEAARKKLAFLQYRRALAVCLWTGKGVESTSLRWHSKRFAKDFAIGSSPEDGASTGVPVARADRLGRASANVPRGASVTISGVFEQKEWNGRLQAPRDALNAIAKVRDDETLPAADRSRRVQQMLSRLPWFVTFSARLVPQGPWLDYASEHSALGLRVDPKYWPHAEENRQRKGMARLILSRLPSLRVLSVDLGHRYAAACAVWETLSAQEMQRICREMGSAPPSPDDLYLHLRRADGNGKQRTTVYRRIGPDTLPDGGQHPAPWARLDRQFLIKLQGEDESARKASDSEIAVVKKFEADLGRPAMQRRSLRVDDLMSAAVRTARLALRRHGDRARIAFNLIADRRFRPGGAEEPLTDETRVDLLADTLATWHGLFSGGQCHDERAEEQWNEHIAPLLASSGASLSVPSDGDAVAATPARRRRKEVRGKLVPAAMELARRDLSQLSVLWVARWHQDDESWRARLRWLRDWILPRGAKADSGAIRHVGGLSVTRLATIRSLWQLQKAYRTQPEPEDPRKNVPKKGDTSLDDFGRTILDDLEHLRENRVKQLASRICEAALGVGVEQPNGGAKDPKRPQERRFSPCQAVVIENLTRYRPEETRTRRENRQLLNWSAGKVKQYLSEACELHGLHLREVSAAYTSRQDSRTGAPGIRCQDIPVVDFVRENGPCWGRLRSAQQSSGGTAEDQLLLALYERWSEKERTWRDQSGNVWAMDGEGRWVARNGTQLPQGSGLTPHPIRVPQRGGDIFVSAAPRSPAANGIQADLNAAANIGLWALLDPDWEGRWWRLPCSAMDLKPVKGSVNGSAVIHLDAPLKAAATKGAAKKDVVNLWRDISVRSLTEGVWRGYDAYWNLARYRVVQTLRPQVGIGSDE

SEQ ID NO: 123 - protein, 1247 aa, Unknown
  Description of Unknown: Cas12 sequence
MFKGDAFTGLYEVQKTLRFELVPIGLTQSYLENDWVIQKDKEVEENYGKIKAYFDLIHKEFVRQSLENAWLCQLDDFYEKYIELHNSLETRKDKNLAKQFEKVMKSLKKEFVSFFDAKWNEWKQKFSFLKKWWIDVLNEKEVLDLMAEFYPDEKELFDKFDKFFTYFSNFKESRKNFYADDGRAWAIATRAIDENLITFIKNIEDFKKLNSSFREFVNDNFSEEDKQIFEIDFYNNCLLQPWIDKYNKIVWWYSLENWEKVQWLNEKINNFKQNQNKSNSKDLKFPRMKLLYKQILGDKEKKVYIDEIRDDKNLIDLIDNSKRRNQIKIDNANDIINDFINNNAKFELDKIYLTRQSINTISSKYFSSWDYIRWYFWTGELQEFVSFYDLKETFWKIEYETLENIFKDCYVKGINTESQNNIVFETQGIYENFLNIFKFEFNQNISQISLLEWELDKIQNEDIKKNEKQVEVIKNYFDSVMSVYKMTKYFSLEKWKKRVELDTDNNFYNDFNEYLEGFEIWKDYNLVRNYITKKQVNTDKIKLNFDNSQFLTWWDKDKENERLGIILRREWKYYLWILKKWNTLNFGDYLQKEWEIFYEKMNYKQLNNVYRQLPRLLFPLTKKLNELKWDELKKYLSKYIQNFWYNEEIAQIKIEFDIFQESKEKWEKFDIDKLRKLIEYYKKWVLALYSDLYDLEFIKYKNYDDLSIFYSDVEKKMYNLNFTKIDKSLIDGKVKSWELYLFQIYNKDFSESKKEWSTENIHTKYFKLLFNEKNLQNLVVKLSWWADIFFRDKTENLKFKKDKNGQEILDHRRFSQDKIMFHISITLNANCWDKYWFNQYVNEYMNKERDIKIIWIDRWEKHLAYYCVIDKSWKIFNNEIWTLNELNWVNYLEKLEKIESSRKDSRISWWEIENIKELKNGYISQVINKLTELIVKYNAIIVFEDLNIWFKRWRQKIEKQIYQKLELALAKKLNYLTQKDKKDDEILWNLKALQLVPKVNDYQDIWNYKQSWIMFYVRANYTSVTCPNCWLRKNLYISNSATKENQKKSLNSIAIKYNDWKFSFSYEIDDKSWKQKQSLNKKKFIVYSDIERFVYSPLEKLTKVIDVNKKLLELFRDFNLSLDINKQIQEKDLDSVFFKSLTHLFNLILQLRNSDSKDNKDYISCPSCYYHSNNWLQWFEFNWDANWAYNIARKGIILLDRIRKNQEKPDLYVSDIDWDNFVQSNQFPNTIIPIQNIEKQVPLNIKI

SEQ ID NO: 124 - protein, 1250 aa, Unknown
  Description of Unknown: Cas12 sequence
MLSFNWVLFFFFSKMSRSIFSPFTNLYPIQKTLRRELKPLNENFQHDPALSALRNSEIPQRDEQREKDYQAIKPLLDEFHNQFITESLHSLEPQDRSDFILFYQTYQKKKKNKAEISEKELKSLDEEFESRTKALRNAIGTSFSVTAELRKSNPDYVSEKGKPFLTQKSYKILTEAGVLWLLEKKYTSDPEKLALIRRFGNFFTYFTGFNQNRENYYATDEKSTAVAYRAINENLLTFANNCELFEKLSVLSLSELEKKTFNPDSYSEYLTQSGIVFYNEMLANIRSKANLYTQEHKAKLPQPKLLYKQIWSPRGDTIPFDLIASEAEFQETLHTMIRETDQRIPEFNKLLEQIFEEKVDLSQIFFSKTSLNIISNRYFSSWHTLLEKGVELKLFKFKKNDEESFKLPAYLSLAELKELLESAPFQMAEKADADEEKHHQASLFKLQRENLHLEKSHSNWELLLKSMKSDFESFWTWEGEFWSYTLAKKALQSLSALESTNQEHKNLIKMLLDNALYAYRMLKWFKVDTSKLGFVPEGEFYPSLDQLLQDYPLPKWYDMIRNYLTRKTYSQAKLKLNFDCSTLLNGRDKNKEIQNLSVILRKDGKFYLAIMKKDQNKFFENSALYEGNLGTMEKMDYKLLPWANKMLPKCLMPGSDKKKYGASDQVLELYAKGSFKKSEKSFNLADLHTLIDFYKLALPKYEDWKVFNFQFQATENYQDISQFYREVEQQGYLLNWRKVNEKLIKQGIKDWSLFLFQISSKDFEGKSKTPDLQTLYWQQLFEFSTNVKLNGEAEIFFRPWSMKKEKKKLKVDNYDVFKHKRYTEDKILFHVPITLWFGNNEVSPSAPSKFNQKLNQELIIPHFDDLHVIGVDRWEKHLAFYSVVSVKTGKIVKQGTLNLLNGTDYEAKLSQKAENRLYARQNRDTIEKIADLKNGYISQVVNKLVELVLEYNAVIVFEDLNAGFKRGRQKIEQSVYQKLELALAKKLNFIVKKEKAVGEPWSVTSAYQLAPQINTFWDIKWKQRGIMLYTRANYTSVTDPLTGWRKQYYFKKGSSEEMKAQFFKSFKNLTRDAGQEAYIFDDGTWLLYSNVERRRGKRGDHRERTQIKYDPSLELDTLFSKYQIEKSDSLFDQLKNRELPQTFWTSFFRIIDLIMQIRNTDDEGRDIILSPIGNPQERFDSRKRYNQLPRDEKGGIIEESAFEYPTSWDANGAYNIARKGVMMLERIKENPEKPDLLIRDAEWDKKITRK

SEQ ID NO: 125 - protein, 669 aa, Unknown; identical to SEQ ID NO: 104
  Description of Unknown: Cas12 sequence

SEQ ID NO: 126 - protein, 1367 aa, Unknown
  Description of Unknown: Cas12 sequence
MNRIYQGRVTKVEILNGKNADGQPQELPNWQTALWQHHELFQDAVNYYLFCLAALASSASSPMGKLRNQLGSVWEPFGRTGRRFKGLRDSVGPYLLPDRPTPSIEEAFAAALAGNNSQPELLQLAVDALVEDLGGDAAIQQEGRGYLPRLCSPAYNGQFPRGANSLQKEAAKIRLPTLLHNVATSRNLDALAAELEFGFFANPVPNAGPIAGQEARNKLLEALAWLKAKDTRLTHSANELEKRIGVLPDSVSFPTYSGGSINKEALKHRFFAYLLFQHVERSLVTFEILRDSYPTPKPSARKSSKATPDTMAQLTQFGDDPVKLARGTRGYVFRAFTSLPCWGAKAPSDILWSEFDIAAFKEALKTANQFRLKTKERLDKADELAGELAWMNGEKSKFKPSEHSEQEPPAVLKGDPRFEVLKQLFEVELAEEHYLAEGESVIYGLHPRTLRCYRELVERWNKTVQPGEVFTEATSKKLVASTDKFQAENKERIGSVTLFKKLLERDYWCLWQTPDVQTVAARQKAGFSSNIIEDYQRYLELQTDIARLKEPIRFTPADAEQSRRLFMFSDLAGKSKHKHLPNATPYGFAVDVALAASEGGVWKETRVRLHYSAPRLRRDGLRKGVGEDLKRTAWLQPMVAALNLSEPAPQDFSKCAVSLMPDKSWKGLRHLLNFPVTLDPTVVQKAIGSQARWANQFVAFGKGATEQKFFLRWPEEVSASQKKAGPWWDALRAFSCLSVDLGQRDAGAFALLDVRANADWGKKPSRFIGEADGRNWRAALAAAGLLRLPGEDALVWRDGKWQEELYGEKGRLATKEEWLETNAIFSALEQNSEEWIGADPKRRSFPELNSKLLVVARRGQSWLARLHRWLWMLGDENKRERALRELLEQERQEAWRKRAEGKDLLALKQSLTAEIQRLNGLLPEQLVFLANRCLPLRNRKWAWNQHPDKAFAEKGCHLLEMVEAPSHLPLLAGQRGISFERIGQLEELRRRFQSLNRVLQRELGAPPKSGRELRDDLVPDCCPDILAKLDRVKEQRVNQTAHLIVAQVLGVQLRKHQTPESERTERDLHGEYEIMPGRKPVDFIVLEDLSKYLSSQARGRGENVRLMKWCHRQVTAKVKELCEPFGLPVLETPAAYSSKFCSRTGVAGFRGVEVTLKDRQSFPWSKRLEEDSAEVAELFGWLETASAGHKTKQPRCLLAPMSLGPLFIPVTSQAPIMQADINAAINLGLRAMAAPSVHEIHVRIRSEAKDGQFRVRAQSKREKARWGNEPPPIKMLVETQRVALAREGGHPNFFVDPLKAATFDRAEVEGLGLPVASGRGLWKSVRDAEWKRCREINLERMRRWGFIMEAPRTLQVSRKEDEDDLTF

SEQ ID NO: 127 - protein, 1202 aa, Unknown; identical to SEQ ID NO: 103
  Description of Unknown: Cas12 sequence

SEQ ID NO: 128 - protein, 1352 aa, Unknown
  Description of Unknown: Cas12 sequence
MSTQKNPFNQFTNLYELQKTLRFELRPVPETKKLLEKGEGKNLIQMDLEIDRLYEKEMKPMFNILHEKFINESLGLVKLDCKKLKKLENLLAEADKLRKQIKEGRKNKNNISEVEKRLKIIIGDNSQGKNKNGEIAVLQDELRVLIVKAFNLTADKWKKELNNKETLLPEKKGKRKIKIKKSGPKILQEENVLAILAYFNPDKADIIKKFAGFFTYFSGFNQNRANYYTVKALATGVANRAINRNFLIFLANRKDFARFKERLPRLAEFDNYFELENYEKYLSQTGIEEYNDQIGKIKQIVNLEHNQQQKDNKFQLKGLATLEKQIGCRTKKQREEGGDKSAPKFLEKVGLGFQVSQDDDGEYLIWECLNYINKELAGKLKSIKDNYQKFFADWRTGAYDLEKIWFRKEALNTISGRWFGGNNWFIIGKALALTGVGKFDKRENTYKIPEFVSLAEIKTAFEMLENGVNYDFKKSKKKKEGDDTDVVKYSADNLFKEEYKKKGLIKNSLFETMLAVWQSEIKRKFEQIFDGYKLEKDDVFGRKKGEWVEPFIENFQKVSQEKFDRGVKDENGRSIHTEVVKNLIEEGYLRLFQLTKYHNLDKKGERDPRPFDGNFYATLDEFWKDNIVVVYHKALQSTLTKKPYSEDKIKLNFENGSLLGGFSDGQERSKAGVVLKNKNKFYLGILIDRGFFRTDKANPVYDNAQNNEWERLILTNLKFQTLAGKGFLGKHGVSYGEMGKDNPMMAVEYLQKFIKLKYLDKYPALNEVAHKKYTIKKEFDADVKNALKDCFTMNFKPVDFGMIRQGLTESLFYLFEIVNKDISSQAKNGKNVHTLYWEALFGDQNLKKPILALNGGAEIFYRESQREKLEKKLDKSGKEVLDHKRYGQDKYFLHASITINYGQPKNIKFKEVINEKISQNADRVNIIGIDRGEKHLLYYSVVSPEGVLLEQGSFNQIETKNKVDIKAVKAEYGERGELKKVELVPTGKKVKYVDYQILLDYYEKKRNLARRDWQTIGKIKDLKDGYLSQTVHRIYQLILKYNAVVAMEDLNVEFKAKRAAKVEKSVYKNFEMALAKKLNHLILKDRRADEIGGALRAYQLTPAIPANDVGKFDKAKQWGIMFYVRANYTSTTDPLTGWRKHKYISNSEKIDNIQKFFSPGDGIQIDYDTEKQCFKFSYDHELEGGAKKHWELFACDGLERFYWDNRERQIKKYNLYEEFEKLLGGLRKEENINIQIDGVSEFRWKDLVFFWNLLNQIRNTDRSAQGDENDFLQSPVWSEKYNCFYDSRKAPNNMPNNGDANGAFNIARKGQLILERIKKCSDIPKFGNDNNGKNPENNYFISDADWDKFAQK

SEQ ID NO: 129 - protein, 1129 aa, Unknown; identical to SEQ ID NO: 3
  Description of Unknown: Cas12 sequence

SEQ ID NO: 130 - protein, 1352 aa, Unknown; identical to SEQ ID NO: 128
  Description of Unknown: Cas12 sequence

SEQ ID NO: 131 - protein, 1108 aa, Unknown
  Description of Unknown: Cas12 sequence
MAIRSIKLKLKTHTGPEAQNLRKGIWRTHRLLNEGVAYYMKMLLLFRQESTGERPKEELQEELICHIREQQQRNQADKNTQALPLDKALEALRQLYELLVPSSVGQSGDAQIISRKFLSPLVDPNSEGGKGTSKAGAKPTWQKKKEANDPTWEQDYEKWKKRREEDPTASVITTLEEYGIRPIFPLYTNTVTDIAWLPLQSNQFVRTWDRDMLQQAIERLLSWESWNKRVQEEYAKLKEKMAQLNEQLEGGQEWISLLEQYEENRERELRENMTAANDKYRITKRQMKGWNELYELWSTFPASASHEQYKEALKRVQQRLRGRFGDAHFFQYLMEEKNRLIWKGNPQRIHYFVARNELTKRLEEAKQSATMTLPNARKHPLWVRFDARGGNLQDYYLTAEADKPRSRRFVTFSQLIWPSESGWMEKKDVEVELALSRQFYQQVKLLKNDKGKQKIEFKDKGSGSTFNGHLGGAKLQLERGDLEKEEKNFEDGEIGSVYLNVVIDFEPLQEVKNGRVQAPYGQVLQLIRRPNEFPKVTTYKSEQLVEWIKASPQHSAGVESLASGFRVMSIDLGLRAAAATSIFSVEESSDKNAADFSYWIEGTPLVAVHQRSYMLRLPGEQVEKQVMEKRDERFQLHQRVKFQIRVLAQIMRMANKQYGDRWDELDSLKQAVEQKKSPLDQTDRTFWEGIVCDLTKVLPRNEADWEQAVVQIHRKAEEYVGKAVQAWRKRFAADERKGIAGLSMWNIEELEGLRKLLISWSRRTRNPQEVNRFERGHTSHQRLLTHIQNVKEDRLKQLSHAIVMTALGYVYDERKQEWCAEYPACQVILFENLSQYRSNLDRSTKENSTLMKWAHRSIPKYVHMQAEPYGIQIGDVRAEYSSRFYAKTGTPGIRCKKVRGQDLQGRRFENLQKRLVNEQFLTEEQVKQLRPGDIVPDDSGELFMTLTDGSGSKEVVFLQADINAAHNLQKRFWQRYNELFKVSCRVIVRDEEEYLVPKTKSVQAKLGKGLFVKKSDTAWKDVYVWDSQAKLKGKTTFTEESESPEQLEDFQEIIEEAEEAKGTYRTLFRDPSGVFFPESVWYPQKDFWGEVKRKLYGKLRERFLTKAR

SEQ ID NO: 132 - protein, 1125 aa, Unknown; identical to SEQ ID NO: 47
  Description of Unknown: Cas12 sequence

SEQ ID NO: 133 - protein, 1352 aa, Unknown; identical to SEQ ID NO: 128
  Description of Unknown: Cas12 sequence

SEQ ID NO: 134 - protein, 767 aa, Unknown; identical to SEQ ID NO: 112
  Description of Unknown: Cas12 sequence

SEQ ID NO: 135 - protein, 1202 aa, Unknown; identical to SEQ ID NO: 103
  Description of Unknown: Cas12 sequence

SEQ ID NO: 136 - protein, 1375 aa, Unknown; identical to SEQ ID NO: 35
  Description of Unknown: Cas12 sequence

SEQ ID NO: 137 - protein, 1496 aa, Unknown
  Description of Unknown: Cas12 sequence
MADDLSTQRAYTLRLQGTDPEDQSWRDALWMTHEAVNAGGRAFGDWLLTLRGGIAHELADTPVKGKKDITDELRKKRRILLALSWLSVESRRGAPDKFIVAGGEEPAGSRNEKVLQALKEILKRRGLSAEESESWMSDCRASLSAAIRDDAVWVNRSAAFDDAQVRIGASLTREDIWDMLDPFFGSREAYLTPAKKKKEDEDSSEGTGEEKAKDLVQKAGQWLSSRFGTGKGANFDAMAEVYSKISEWAGTAQEGVSGKEGIKNLADALAAFSPVSQNLEGVLKLISGPGYKSATRNLLGELDSLPVVSRDHLSALHEKAAEDTVKCKESTGTKGRRPYADAILNDVEKRCGFTYLTDSDNRSVSILDTSEFPSDYKWGTARHSEFAVILDHAARRISVAHSWIKLAEAERDRCEEDAAKVYDLPDKVKEWLDTFCSNRSDISGAQGEGYRIRRKAIEGWKEVVASWGRSSCITAEDRVAAARALQDDPEIDKFGDIQLFEILAQDEALCVWHKDGDVAKSPDAQMLIDYVLASDAESKKRRFKVPAYRHPDALLHPIFCDFGNSRWDITYDIHGARGKKKAKRGSKKEEAMPRGVAMKLWTGSDVLSVSLRWQSKKLAADLALDQEAEEVTDTAAVSRADRLGRAAAGIDRGAGVTIAGLFEEAHWNGRLQAPRQQLEAIAAVRDNQKLSSEERERRIAFMKDRIRWLVTFSAKLRPQGPWHSYAPTQGLQSDPKYWPHSEINKKRKGQAKLILSRLPGLRILSVDLGHRFAAACAVWETMSSEAIQEACRLANHQLPAPADLYLHLKRTVQKNLIDGEKTVEESTVYRRIGADRLPDGTAHPAPWARLDRQFLIKLQGEEKVREASNEEVWQVHLMESALGLSFPLIDRLVYAGWGGTEKQAARLEALREKGWKPTGTPADQDEEGGGYKPSLAVDELMFSAVRTLRLALKYHGDRARIAFALTADYKPMPGDTRYYFSEAKDRSSGADAAEREAKHKDYLLDMLLLWHDLAFSRKWRDEEAKELWNLHIAALPGYQAPAAPIQEEAGQGRKKAREEARAKMTPAAEALLADGTLREKLHGLWKERWEKDDAQWKKHLRWMKDGILPRGGRAATPSIRYVGGLSLTRLATLTEFRRKVQVGFYTRLFPSGEKREIKEAFGQTALDALERLREQRVKQLASRIAEAALGAGRVSRTALKQDPKRPEARVDAACHAVIIENLEHYRPEETRTRRENRGLMNWASSKVKKYLSEACQLHGLFLREVPAGYTSRQDSRTGAPGMRCQDVTVKTFLNSPFWQKQCVQAQKNKSTARDRFLCALKEAVAQGGMEEEKKMGPIRVPVPGGEVFVSADAASPAAKGLQADLNAAANIGLRALLDPDWPGKWWYVPCDRKTAYPAKEKVEGSAAVDVKQALPFVLPEEKENKGKTKGGKKGKGEVMNLWRDVSAEPLMTGQWLDYTAYRKEVENRVIQVLTAQLKARNPLRFGNLGDEEEIPY

SEQ ID NO: 138 - protein, 1108 aa, Unknown; identical to SEQ ID NO: 131
  Description of Unknown: Cas12 sequence

SEQ ID NO: 139 - protein, 1098 aa, Unknown
  Description of Unknown: Cas12 sequence
MPVRSINLKIVISRNTQGEKSRQSIWTTHAAVNDAVRYYEEQLLIMRGLGYHISDKDVVSKESIQQERLSRIRRAQLENGLPEPLGTDAELNSLVRKFYEFIVPSSVKEDGNAQQANGFLSPLTDPISIGYLSIFEKLGTIPDWVGQLKAGDPQAVENAKKWSATSAGIKRLSETGAPPKWKKLFLTGDPSWPQSFSEDIDKKIKEIEGAPKVICQLMEMGVLPLFPAYFADKLEGSDGSLSRWDRLAFRLAVGHMLSWESWCIKSAEDHFERKRRVESFSEKHTTPSLIICFETLEKYQKERQEKELGQNRSLPMQRPFRITRRQIRGWEDLRDKWLKNTTRTYDSLKSIASKEQTKKGGRFGDPHLFLWLAKPENHAVWDADEDALSIFAKMNAMRGLLERSRETAYMTLPDPIEHPRSIQWEAEGGSNFKNYVITHSPVEGLHVQLPLLCKSESGKLIDQTFEFPLAPSDQFKVAQISKTKSEVTITHQSVLDEEYRSKVGAADLLMDWPYLKNRRFESVEHGDIGPVFLKLSLDIERILPDGWTPKRPQAISHFSSASGNSKHKLSVVSGLRVLSVDLGIRSFGACSVFELSEHKPTSGMSFEIEGLNLWANHERSFMLNLPDEDVGNKGRQLQKTKDAELRAMRRVLGRYRKIYALAGIDPEDRKDILELLCQDQDIFEFERTIYKGLVTSTSVSQPLWEGKIKESLKALRNAFGRKVREWRRANRLNSNLKYAGKTMWAIQHLEDTRRFLHSWSHLGRFSGEIRRADRVKRGVFATRLLQHLDSVKRDRLKTGADLLVQSARGFLRDNQGNWKKSYAPCQVILFEDLSRYLMQTDRPRRENSQLMKWSHRSIPLEVAMQGELYGIHVCDTSAAFSSRYHARLATPGIRCHALRKEDLSNQFLIESLQKENPDIDFGICKAGDLIPRGGGEIFVSCDGNGGISRIHADINAAQNLQRRFWLRHGEAIRIPARKITLKGDEIWVPRSIGKRLQGAMSGCGYLIPTGHESGSCRWERITASKWESISRSSVAQKEEVNEDLLDIALLEEEALELSNEYTTFFRDPSGITLPSDLWFPMKTFWGMTRAKIKSAIKQ

SEQ ID NO: 140 - protein, 1130 aa, Unknown
  Description of Unknown: Cas12 sequence
MTVKSIKVKLRLDNMPEIRAGLWKLHTEVNAGVRYYTEWLSLLRQENLYRRSPNGDGEQECYKTAEECKVELLERLRARQVENGHRDPAGSDDELLQLARQLYELLVPQAIGAKGDAQQIARKFLSPLADKDAVGGLGIAKAGNKPRWVRMRDAGEPGWEEEKAKAEARKSTDRTADVLRALADFGLKPLMRVYTDSDMSSVQWKPLRKGQAVRTWDRDMFQQAIERMMSWESWNQRVGEAYAKLVEQKSRFEQKNFVGQEHLVQLVNQLQQDMKEASHGLESKEQTAHYLTGRALRGSDKVFEKWEKLDPDAPFDLYDTEIKNVQRRNTRRFGSHDLFAKLAEPKYQALWREDASFLTRYAAYNSILRKLNHAKMFATFTLPDATAHPIWTRFDKLGGNLHQYTFLFNEFGEGRHAIRFQKLLTIEHGVAKEVDDVTVPISMSAQLDDLLPGESNEPTELSFRDHGTDQHFTGEFGGAKIQYRRDQLDHVHRRRGARDVYLNLSVRVQSQSEARGERRPPYAAVFRLVGDTHRAFAHFDKLSNYLAEHPDDGKLGSEGLLSGLRVMSVDLGLRTSASISIFRVARKDELKPNSEGRVPFFFPIKGNDNLVAVHERSQLLKLPGETESKDLRAIREERQRILRQLRTQLAYLRLLVRCGSEDVGRRERSWAKLIEQSVDAANHMTPDWREAFEGELQKLKSLYGICGDREWTEAVYESVRRVWRHMGKQVRDWRKDVRSGERPKIRGYQKDVVGGNSIEQIEYLERQYKFLKSWSFFGKVSGQVIRAEKGSRFATTLREHIDHAKEDRLKKLADRIIMEALGYVYALDAERGKGTWVAKYPPCQLILLEELSEYRFNNDRPPSENNQLMQWSHRGVFQELLNQAQVHDLLVGTMYAAFSSRFDARTGAPGIRCRRVPARCAREQNPEPFPWWLNKFVAEHKLDGCPLRADDLIPTGEGEFFVSPFSAEEGDFHQIHADLNAAQNLQRRLWSDFDISQIRLRCDWGEVDGEPVLIPRLTGKRTADSYGNKVFYTNTGVTYYERERGKKRRKAFAQEELSEEEAELLVEADEAREKSVVLMRDPSGIINRGDWTRQKEFWSMVNQRIEGYLVKQIRSRVCLPESACENTGDI

SEQ ID NO: 141 - protein, 1333 aa, Unknown; identical to SEQ ID NO: 95
  Description of Unknown: Cas12 sequence

SEQ ID NO: 142 - protein, 606 aa, Unknown; identical to SEQ ID NO: 54
  Description of Unknown: Cas12 sequence

SEQ ID NO: 143 - protein, 1193 aa, Unknown
  Description of Unknown: Cas12 sequence
MKRIAKFRHDKPVKREAWSKGYRVHKNRIINKVTRSIKYPLVVKDEWKKRLIDDAAHDYRWLVGPINYSDWCRDPNQYSILEFWIDFLCVGGVFQSSHSNICRLAIQLSGGSVFEQEWKDLSPFVRANLIQGIKPAEFIGFLTAEFRSSSNPKNFISKFFEGSNEDLESLTNEFASIVDFIKAKDISLLRKSLPSCKKIAPNLWEKAVGSHSTNELLKLLTKYTRVMLVAEPSHSDRVFSQTVLQSNDQDDPELTGPLPSHKVGKASYLFIPEFIREVNLDKISKLDLSAKSKLAVEQVKKLSELTSDFKQIENQSEAYFGLSTSFNELSNFLGILIRTLRNAPEAILKDQIALCAPLDKDILKITLDWLCDRAQALPENPRFETNWAEYRSYLGGKIKSWFSNYENFFEIPQAASSQQNNNREKKLGNRSAIRALNLKKEAFEKARETFKGDKGTLEKIDLAYRLLGSISPEVLQCDEGLKLYQQFNDELLVLNETINQKFQDAKRDIKAKKEKESFEKLQRNLSSPLPRIPEFFGERAKKGYQKARVSPKLARHLLECLNDWLARFAKVEESAFSEKEFQRILDWLRTSDFLPVFIRKSKDPPSWLRYIARVATGKYYFWVSEYSRKRVQIIDKPIAQNPLKELISWFLLNKDAFSRDNELFKGLSSKMVTLARIMAGILRDRGEGLKELQAMTSKLDNIGLLHPSFSVPVTDSLKDAAFYRAFFSELEGLLNIGRSRLIIERITLQSQQSKNKKTRRPLMPEPFINEDKEVFLAFPKFETKNKVKGTRVVYNSPDEVNWLLSPIRSSKGQLSFMFRCLSEDAKIMTTSGGCSYIVEFKKLLEAQEEVLSIHDCDIIPRAFVSIPFTLERESEETKPDWKPNRFMGVDIGEYAVAYCVIEKGTDSIEILDCGIVRNGAHRVLKEKVDRLKRRQRSMTFGAMDTSIAAARESLVGNYRNRLHAIALKHGAKLVYEYEVSAFESGGNRIKKVYETLKKSDCTGETEADKNARKHIWGETNAVGDQIGAGWTSQTCAKCGRSFGADLKAGNFGVAVPVPEKVEDSKGHYAYHEFPFEDGLKVRGFLKPNKIISDQKELAKAVHAYMRPPLVALGKRKLPKNARYRRGNSSLFRCPFSDCGFTADADIQAAYNIAVKQLYKPKKGYPKERKWQDFVILKPKEPSKLFDKQFYRPN

SEQ ID NO: 144 - protein, 606 aa, Unknown; identical to SEQ ID NO: 54
  Description of Unknown: Cas12 sequence

SEQ ID NO: 145 - protein, 1108 aa, Unknown; identical to SEQ ID NO: 131
  Description of Unknown: Cas12 sequence

SEQ ID NO: 146 - protein, 1110 aa, Unknown
  Description of Unknown: Cas12 sequence
MVVRSIKLKMKTNSGTDSIYLRKALWRTHRLINEGIVYYMSLLTLYRQDTLGDRTKEEIQSELIKKIREQQRNNGLSEELGSDQEILSLLRHLYELIIPSINGESGDANQLGNKFLYPLVDPNSQSGKGTSNAGRKSKWKRMKEEGNPDWEVEFKKDEERKANDPTIKVFDHLKKYSLLPLFPLFTNNQKDIEWLPMGKRQSVRKWDKDMFIQAIERLLSWESWNRRLGAEREKLEEKIENFYKEHLSGGQIWIEKIREFERVRDRELGETSFSSNDGYLITSRQIRGWDRVYEKWSKISESASKEELWRVVAEQQSKMREGFGDPKVFSFLAELENMDIWRKHPERIYHIATYNGLLKKLSHTKAQATFTLPDAVKHPLWIRYEAQGGTNLNLFKLEETTKKNCKVILSKIIWPTEDGWFEKENVEVDLAPSKQFYRQIKLQDHIKGKQEISFSDYSSGISLKGVLGGSRIQFDRKYIENHQELLPSGDIGPVFFNLVIDLLPIQETRNGRLKSPIGKTLKVVSSEFPKVIDYKPKELTEWINVSSVTGKVGVESITEGMRVMSIDLGQRTSASVSIFEVVKELPKDKEKMLYYNIKDTELFALHKRSFLLNLPGEEVTKRNRQKRKDRRKKLLFIRSQIRMLASVLKLETKNTPDERKKAINKLVEIVDSYEWTESEKEIWNSEFEYLTNKAVFKQEIWRESLIKSHHRMEPHVGQLVSEWRKSLNEGRRNLAGITMWNIEELEDTRRLLISWSKRSRTPGEANRINNDEPFGAKLLEHIQNVKDDRLKQLANLIVMTALGYKYDKEEKSRDKRWKEKYPACQVILFENLNRYLFSLDRSKRENSKLMKWAHRSIPRTVWMQGEMFGLQVGDVRSEYSSRFHAKSGAPGIRCHSLNDEDLKEESFKLKHLIETGFISEEEISSLKKGDIVPWPGGELFVTLSKPYKKGKDIELTVIHADINAAQNLQKRFWQQNSEVYRIPCQLEKAGDDEFFIPKSQTEIVKKYFGKGRFVKINDKKEVYNWEESEKMKIKTESTITLQDLEGFEDIFQTLELAQEQQKKYSTLFRDPSGYFFNEKNWRPQKEFWSIVNNIIRSSLKKKILKNKVEV

SEQ ID NO: 147 - protein, 687 aa, Unknown
  Description of Unknown: Cas12 sequence
  MOD_RES (156)..(527): Any amino acid
MSNPNIPNISPNITLTRDDVVNLLMSSIAMEELGLAHIINAEGEKIQFALGTLQGASGPPATLQQVLEVNQSTQAMLDTIFRQEMMLDSKLKTATNIPTLRGPTGPVGPTGAPGGVISINGQTGVVTLDASNGVMPFMREQSTSSLDDYKDPGIYXXXXXXXXXXXXXXXXXXXXXXXXXXXXXXXXXXXXXXXXXXXXXXXXXXXXXXXXXXXXXXXXXXXXXXXXXXXXXXXXXXXXXXXXXXXXXXXXXXXXXXXXXXXXXXXXXXXXXXXXXXXXXXXXXXXXXXXXXXXXXXXXXXXXXXXXXXXXXXXXXXXXXXXXXXXXXXXXXXXXXXXXXXXXXXXXXXXXXXXXXXXXXXXXXXXXXXXXXXXXXXXXXXXXXXXXXXXXXXXXXXXXXXXXXXXXXXXXXXXXXXXXXXXXXXXXXXXXXXXXXXXXXXXXXXXXXXXXXXXXXXXXXXXXXXXXXXXXXXXXXXXXXXXXXXXXXXXXXXXXXXXXXXXXXXXXXXXXXXXXXXXXXXXXXXXXGATGATGATGATGPQEPRALREPRAPQARREPRGLLEPQVLRGPQEPRALREPRAPRALREPRALRALRALQELRAPRALRGLQEPRVLQGPRERQVRPEPRVLQGPRERQVRQGLQGLLEPRAKRERQVRPEPREPQERQAPLVQQALLEPQALLGQAL

SEQ ID NO: 148 - protein, 1380 aa, Unknown
  Description of Unknown: Cas12 sequence
MNRIYQGRVSKVEIPNPGDKGKPWQPLPNWQDILWQHHELFQDAVNYYLLALLSLARDSANPATPIRKRMDDPASEHQIWTSFRRRGQMRSGMRDSVAKYLCPVKTEPTLDECFAAVLEGNKENPDVLDLALQELLDECDGDGAIQQEGRSMLPRFCSPSYKGDFPQSAAAKDKKSAKEWLPTFLHSAENASNLKLVRQRLKFELFANRDLTGRILDAVESRKRLTEMLGWLTERNPSLAAERERLQKIIAALPDTFNLPAWRGGSVNKEALKQRFYAWLIFEHVESSRITFDILRDSFPTPKEKRKSVSETIQSEKPSLELSDDPIKLARGTRGYVFRAFTSLPCWGADNANLLAWKEFDVAAFKEALKALHQVESKSEERNKERERLLQRHSVMRGSIKWKPSPESEEKEPDVLAGDPRIERLEKLLKTELASEYEMSEGQTVEYGLQPRTIRGFRDLRKEWNKIVKPGEPFTEQKKGNLVTALRSYQIENPNVIGSVRLYEALLEKGNWLVWQEADSATVEKWAKQKFASDPLEALTEERQLLRDIERLKQPIRFTPADAVHSRRQFYLAEKGDLSVKNRFDPQNQTLQVPIAIKNDDHWKQQFVKIHFSAPRAVRDQLIDETMEESKEARWQQPMMEALGLSLKLTKNNAEVSLSECTAVSLMPEELASGDRRILLNFPITLETAPMVKALGKASLWDGQFAAYGDDNFYLRWPKDKWPAEKESNAWYRRLTEFSLLSVDLGQRDAGAFAVIGATTGKPTRPASRFIGEANGQSWHASVRATGVLRLPGEDAHVFRSGQWQEELYGERGRSADATEWTEAKRICETLGLKFDEILGGDPQWFSFPELNDRLLFAVRRAQTRLARLQSWSWMIADETRRENIREAILAADDDELSLKAAAEKSLWPVLAEKLASEVNRLRNLIPQQLVLLANRILPLRGRRWEWIKRDDTSGCHVLRETNPGTDTTSKKVCGQRGLSMKRLEQLDELRRRFQSLNRALMQTPGQTAGLGKSKRGIELPDPCPDLLDKTEQLREQRVNQTAHLILAQALGVRLRTPQKGDALREQNNVHGEYETFRLPVDFIVLEDLSRYLSSQGRGRNENSRLMKWCHRAILLKLKQLCESYGLKILETNAAYSSRFCSRTGVAGFRAVELTPDARKEFRWRKHLNRLEKAASGEIKLDREARAESEHVKRLFDMLDQLNAGRKEAGKPLRTLLAPIAGGQIFIPMQGHATQADINAAINLGLRAIAAPDCHAIHVRIRTERKDKTLRVRTGSNREKVRWEGKNPEIQMNKAADLASLTGDRQPNFFPDPSAIACYDRAKIEGVQLPFASGRGLWGTMNIELQWTRVNQLNNDRAEKKWNLTRSLPEQSSEEDYIPM

SEQ ID NO: 149 - protein, 1144 aa, Unknown
  Description of Unknown: Cas12 sequence
MAVKSIKVKLMLGHLPEIREGLWHLHEAVNLGVRYYTEWLALLRQGNLYRRGKDGAQECYMTAEQCRQELLVRLRDRQKRNGHTGDPGTDEELLGVARRLYELLVPQSVGKKGQAQMLASGFLSPLADPKSEGGKGTSKSGRKPAWMGMKEAGDSRWVEAKARYEANKAKDPTKQVIASLEMYGLRPLFDVFTETYKTIRWMPLGKHQGVRAWDRDMFQQSLERLMSWESWNERVGAEFARLVDRRDRFREKHFTGQEHLVALAQRLEQEMKEASPGFESKSSQAHRITKRALRGADGIIDDWLKLSEGEPVDRFDEILRKRQAQNPRRFGSHDLFLKLAEPVFQPLWREDPSFLSRWASYNEVLNKLEDAKQFATFTLPSPCSNPVWARFENAEGTNIFKYDFLFDHFGKGRHGVRFQRMIVMRDGVPTEVEGIVVPIAPSRQLDALAPNDAASPIDVFVGDPAAPGAFRGQFGGAKIQYRRSALVRKGRREEKAYLCGFRLPSQRRTGTPADDAGEVFLNLSLRVESQSEQAGRRNPPYAAVFHISDQTRRVIVRYGEIERYLAEHPDTGIPGSRGLTSGLRVMSVDLGLRTSAAISVFRVAHRDELTPDAHGRQPFFFPIHGMDHLVALHERSHLIRLPGETESKKVRSIREQRLDRLNRLRSQMASLRLLVRTGVLDEQKRDRNWERLQSSMERGGERMPSDWWDLFQAQVRYLAQHRDASGEAWGRMVQAAVRTLWRQLAKQVRDWRKEVRRNADKVKIRGIARDVPGGHSLAQLDYLERQYRFLRSWSAFSVQAGQVVRAERDSRFAVALREHIDNGKKDRLKKLADRILMEALGYVYVTDGRRAGQWQAVYPPCQLVLLEELSEYRFSNDRPPSENSQLMVWSHRGVLEELIHQAQVHDVLVGTIPAAFSSRFDARTGAPGIRCRRVPSIPLKDAPSIPIWLSHYLKQTERDAAALRPGELIPTGDGEFLVTPAGRGASGVRVVHADINAAHNLQRRLWENFDLSDIRVRCDRREGKDGTVVLIPRLTNQRVKERYSGVIFTSEDGVSFTVGDAKTRRRSSASQGEGDDLSDEEQELLAEADDARERSVVLFRDPSGFVNGGRWTAQRAFWGMVHNRIETLLAERFSVSGAAEKVRG

SEQ ID NO: 150 - protein, 647 aa, Unknown
  Description of Unknown: Cas12 sequence
  MOD_RES (35)..(498): Any amino acid
MGLVDTAGGFLIPAALDPAILLSGDGSTNPIRQVXXXXXXXXXXXXXXXXXXXXXXXXXXXXXXXXXXXXXXXXXXXXXXXXXXXXXXXXXXXXXXXXXXXXXXXXXXXXXXXXXXXXXXXXXXXXXXXXXXXXXXXXXXXXXXXXXXXXXXXXXXXXXXXXXXXXXXXXXXXXXXXXXXXXXXXXXXXXXXXXXXXXXXXXXXXXXXXXXXXXXXXXXXXXXXXXXXXXXXXXXXXXXXXXXXXXXXXXXXXXXXXXXXXXXXXXXXXXXXXXXXXXXXXXXXXXXXXXXXXXXXXXXXXXXXXXXXXXXXXXXXXXXXXXXXXXXXXXXXXXXXXXXXXXXXXXXXXXXXXXXXXXXXXXXXXXXXXXXXXXXXXXXXXXXXXXXXXXXXXXXXXXXXXXXXXXXXXXXXXXXXXXXXXXXXXXXXXXXXXXXXXXXXXXXXXXXXXXXXXXXXXXXXXXXXXXXXXXXXXXXXXXXXXXXXXXXXXXXXXXXXXXPSRCRCLAFGRSSSAIRRPAASSSEGVKSLRSVFSERSALARSTTSAIVWHTCTGMRSHPSSRAASSRRWPNTSRLSGVTPIGCSKRQGDSPCGCCCGAHLVVAQRCVAFCCHDRGVTEKLLYSSQVVGAAVGAGGVSVPQGVHGRVTG

SEQ ID NO: 151 - protein, 1262 aa, Unknown; identical to SEQ ID NO: 45
  Description of Unknown: Cas12 sequence

SEQ ID NO: 152 - protein, 978 aa, Unknown
  Description of Unknown: Cas12 sequence
MQEIKRINKIRRRLVKDSNTKKAGKTGPMKTLLVRVMTPDLRERLENLRKKPENIPQPISNTSRANLNKLLTDYTEMKKAILHVYWEEFQKDPVGLMSRVAQPAPKNIDQRKLIPVKDGNERLTSSGFACSQCCQPLYVYKLEQVNDKGKPHTNYFGRCNVSEHERLILLSPHKPEANDELVTYSLGKFGQRALDFYSIHVTRESNHPVKPLEQIGGNSCASGPVGKALSDACMGAVASFLTKYQDIILEHQKVIKKNEKRLANLKDIASANGLAFPKITLPPQPHTKEGIEAYNNVVAQIVIWVNLNLWQKLKIGRDEAKPLQRLKGFPSFPLVERQANEVDWWDMVCNVKKLINEKKEDGKVFWQNLAGYKRQEALLPYLSSEEDRKKGKKFARYQFGDLLLHLEKKHGEDWGKVYDEAWERIDKKVEGLSKHIKLEEERRSEDAQSKAALTDWLRAKASFVIEGLKEADKDEFCRCELKLQKWYGDLRGKPFAIEAENSILDISGFSKQYNCAFIWQKDGVKKLNLYLIINYFKGGKLRFKKIKPEAFEANRFYTVINKKSGEIVPMEVNFNFDDPNLIILPLAFGKRQGREFIWNDLLSLETGSLKLANGRVIEKTLYNRRTRQDEPALFVALTFERREVLDSSNIKPMNLIGIDRGENIPAVIALTDPEGCPLSRFKDSLGNPTHILRIGESYKEKQRTIQAAKEVEQRRAGGYSRKYASKAKNLADDMVRNTARDLLYYAVTQDAMLIFENLSRGFGRQGKRTFMAERQYTRMEDWLTAKLAYEGLPSKTYLSKTLAQYTSKTCSNCGFTITSADYDRVLEKLKKTATGWMTTINGKELKVEGQITYYNRYKRQNVVKDLSVELDRLSEESVNNDISSWTKGRSGEALSLLKKRFSHRPVQEKFVCLNCGFETHADEQAALNIARSWLFLRSQEYKKYQTNKTTGNTDKRAFVETWQSFYRKKLKEVWKPAV

SEQ ID NO: 153 - protein, 1488 aa, Unknown
  Description of Unknown: Cas12 sequence
MGKQSTNSSGLKATSGAPSIEKPVTTQRAYTLRLRGIEGDKTWRDSLWATHEAINLGAKAFGDWLLTLRGGLEHTLADATVAGGKGKPARPPSADERRDRRVLLALSWLTVEDERGAPKAPGLIVAYGDDCKSAKDSQDGRDRKVEDALRDILIKRSVAPGAVESWVNDCVVSLKARIRDDAVWVNRSAAFDALRASWRGLTCPNARTVLEQFFGPVADWITLPARAADDGEGDTGGPTAAGSSNDTEFKLVARSFLSENFGTGLKSSKSDISDALMQATRSLAALRGGSPGSAVWSHLCTEFGLLAADDEARAKALRVRIGWTSGRRSKGRLALATAASKASLAQVDIELLIKKLSEEAQEKLAGSTKLPLPWVNDLMAALERSIGFGFVTERNLIDEFGVMLDHAARRVSIACSWIKLAELERRQFEEDAKKLDQVRTQHADAAAFLDTLGCRRGSESGSAGGASVVIRKRAVLGWNEVVGDWARQGCKSVQERIDAARLLQGELEKFGDIRLFEELAANDAQVVWQNAEGETDPTILARYSAGSVAKANQQRFKVPAYRHPDPLRHPVFGDFGKSRWKIDFAVHESDRAQSGGKRVRSLDAAWQSDVRNMRMALWTGKRVEMVPLRWSSKRLSKDLGISDLSLKDPTVVTRGDRLGRAAVGPGDPVRVASVFAEDNWNGRLQAPRVELNRVARLTQSGNLVQARRLRDRLSWLVSFSPKLAPSGPFIDYAAAHGIEPHKKSGEYWPNSAMNKERKGHHSKLIYSRLPSLRVLSVDLGHRFAAACAVWESMSAAQMRLAASKGKVVRGGIAEGALFIHIESTVADGTVRTTVYRRIGEDALPDGSPHPAPWAKLERQFLIKLQGEETPSRMAALDELVMIADWERALGYQPVTASSTKQSNGVAGLMGRTVRLFMHASRRHFDRARIAHNLTAEHRTKPGGVPESLTEETRIELLIDTLALWHGLFAGDRWRDPRAQKEWETSGLPSLKLPGRGDDDETAFGGPGRKAAMVVYRNELKPHAERMAHSDLSNLSKCWTDRWAQDDREWTAKSGRLRSLRRWITPRGLRPVSGDSAQLIERKAAAALRARHVGGLSMQRINTLTDLYRLLKSFKNRPEPSNLRKNIPEKGDARLIGFNQRLLDVRDRLREQRVKQLASRIVEAALGIGRIKIRRVAAGSPRPTLRVDAACHAVVTENLSNYQPAELQTRRENRQLMAWASSKVHKYLAESCQLHGLHLREVQPNYTSRQCSRTGAAGLRGVAVSATDLLTNPWWMRDVAQAKARIEKALKNGRNGAVADQLLVSAEAWALRIPERDRHDRKADESVKAFHAERVILPRKGGDLFVAESARCNGKGHVPALQADLNAAANVGIRALLDPDWPGKWWWVPCVGGTYSPSPEKTSGAKVLEHIDQLPHEMVDPPQVAPKSSAPQPKSSRAAKVKAKEFRAIENRWRTCSSELLSQGKWIPSGEYWSKVEAAVCLVLNDQIT

SEQ ID NO: 154 - protein, 1400 aa, Unknown
  Description of Unknown: Cas12 sequence
MAAFQRSYTMNLKPATSEQDKFILWNRLFLTHWSVNEGAKIFGELFLNLRGGLSPELDIFDLDKVKDDKKKKAFVMGRRRLLALGWLSVEDNLSAGEHPFRIREIPVGRNMGKSQASTLLTEILKNKGIKDEAVIKEWIDDCTPSLIANIREDAVWINRASSFNSITPCPTKDEVWIVLSGLLGLRFLDLSLEEVKGKETEYLYDLGEKETQSKSDPSKKARELFGNLFTQNPVLMKNSRDKKDTFAKEFYLAFKEFKDYEKLKEKIESWRKEKEFPLIENPVAEKYPPEVTFTGSPCTVSKRYRKLLVSLELWPSSQDENGNIPKTEKTEDKTHNQVLLDYLLKACNEGNKGTQKIITPVWANNLKAELELKMNEIIRIGESSSTELQRLMIKMAARRISQTLSWIKINEQTKHDAYQKKNKAFKLLSEIDKNGEACKWLENYELFRTDDSGGEEYHISLRAISCWKQILEEWQKNDSPKALREKVKEVQAEEEKFGDARLFEDLADDNARSVWLLPDGNKTPDILNWWCEYRTAEIDESRFKIPCYCHPHPFKHPVYVEYGKSNPKVIFAMKNNKVKKGHIEHGWNPQNPRSIALSLFNNGNRESSLVPFIWESKRLWKDLGGEATQIGDIPRSDRMGLSGKRESVKPKAPFQKEVWNARLQSDRRTLEKLEKYWNPESMKWIDDGKFLIQSKWFITFGPDMETAEGPWKLYLKEKYVDNKILGNRSKENQKRGYRAKKLLSGYPAGMRILSVDLGHRYAASCAVWETITKKQITEELAYQPDNNSLFEHSCKTIDKKIKNTVYRRIGEDSIDAPWAKLEKQFTIKLQGEDKSCYLLRSDEKELFRSILSKLSCLNNDTGHNILEMIENLLRIVKAKIYRQGILARISYSMTAQYKPGKGGQKSPLSDEDKIHYLSENLAAWSAIMGNQEWNEDVISDWYKTYISHLVSGPKPKEGNRKSDRDKIIEYFLPAARKLYDDNETRIKIHDLFKELWDENNKQLSAVLKEIKKIILPKGIRYFDKNTDNPSKWKNNQSKLKQITHRGGLSMQRIVAIEEYYKLAKAYKNHPEPDDLTKNIPLPGDNSSAGFNQRIRDTLERMKEQRVKQIASRIVESALGLGIEGYKKRPLTPENKPCQAIVIEDLSHYRPDELQTRRENRRLMQWSSSKVKKYLKEACEMHDVRLVEISPEYTSRQDSRTGAAGLRCIDINIREFLKDSSRWQNKINTIQKKPANKKSNLDQYLIELNESLGNKYKDKVIPSDNFVRIPRKGGDVFVSSSKESPVSKGIQADLNAAANIGLKALLDPDWAGAWWYILIEVKSNHVIPYGEKYKGSECLRAWKFSGLENQVMKNNMNLWRDLQSQFSGEDKWMSYKEYNELTEKRVINILRERAGLELIKE

SEQ ID NO: 155 - protein, 1263 aa, Unknown; identical to SEQ ID NO: 72
  Description of Unknown: Cas12 sequence

SEQ ID NO: 156 - protein, 1193 aa, Unknown; identical to SEQ ID NO: 143
  Description of Unknown: Cas12 sequence

SEQ ID NO: 157 - protein, 1108 aa, Unknown; identical to SEQ ID NO: 131
  Description of Unknown: Cas12 sequence

SEQ ID NO: 158 - protein, 1283 aa, Unknown; identical to SEQ ID NO: 46
  Description of Unknown: Cas12 sequence

SEQ ID NO: 159 - protein, 1413 aa, Unknown
  Description of Unknown: Cas12 sequence
MNRIYQGRVTKVEKLKNGKSPDDREELKDWQTALWRHHELFQDAVSYYTLALAAMAEGLPDKHPINVLRKRMEEAWEEFPRKTVTPAKNLRDSVRPWLGLSESASFGDALKKILPPAPENKEVRALAVALLAEKARTLKPQKTSASYWGRFCDDLKKKPNWDYSEEELARKTGSGDWVAGLWSEDALNKIDELAKSLKLSSLVKCVPDGQINPEGARNLVKEALDHLEGVSNGTKKEKNDPGPAKKTNNWLRQHASDVRNFIHKNKNQFSSLPNGRLITERARGGGININKTYAGVLFKAFPCPFTFDYVRAAVPEPKVKKVDQEKKSEQSATWTELEKRILRIGDDPIELARKNNKPIFKAFTALEKWSDQNSKSCWSDFDKCAFEEALKTLNQFNQKTEEREKRRSEAEAELKYMMDENPEWKPKKETEGDDVREVPILKGDPRYEKLVKLFGDLDEEGSEHATGKIYGPSRASLRGFGKLRNEWVDLFTKANDNPREQDLQKAVTGFQREHKLDMGYTAFFLKLCERDYWDIWRDDTEVEVKKIREKRWVKSVVYAAADTRELAEELERLQEPVRYTPAEPQFSRRLFMFSDIKGKQGAKHIREGLVEVSLAVKDQSGKYGTCRVRLHYSAPRLIRDHLSDGSSSMWLQPMMAALGLSSDARGCFTRDSKGNVKEPAVALMSDFVGRKRELRMLLNFPVDLDISKLEENIGKKARWEKQMNTAYEKNKLKQRFHLIWPGMELKETQEPGQFWWDNPTIQKEGMYCLAIDLSQRRAADYALLHAGVNRDSKTFVELGQAGGQSWFTKLCAAGSLRLPGEDTEVIREGKRQIELSGKKGRNATQSEYDQAIALAKQLLHNENSAELESAARDWLGDNAKRFSFPEQNDKLIDLYYGALSRYKTWLRWSWRLTEQHKELWDKTLDEIRKVPYFASWGELAGNGTNEATVQQLQKLIADAAVDLRNFLEKALLHIAYRALPLRENTWRWIENGKDGKGKPLHLLVSDGQSPAEIPWLRGQRGLSIARIEQLENFRRAVLSLNRLLRHEIGTKPEFGSSTCGESLPDPCPDLTDKIVRLKEERVNQTAHLIIAQSLGVRLKGHSLFTEEREKADMHGEHEVIPGRSPVDFVVLEDLSRYTTDKSRSRSENSRLMKWCHRKINEKVKLLAEPFGIPVIEVFASYSSKFDARTGAPGFRAVEVTSEDRPFWRKTIEKQSVAREVFDCLDNLVGKGLNGIHLVLPQNGGPLFIAAVKEDQPLPAIRQADINAAVNIGLRAIAGPSCYHAHPKVRLIKGESGTDKGKWLPRKGKEANKRENAQFGNVDLDLEVKFNRLDIDSDVLKGDNTNLFHDPLNIACYGFATIQNLQHPFLAHASAVFSRQKGAVARLQWEVCRAINSRRLEAWQKKAEKAAVKR

SEQ ID NO: 160 - protein, 1408 aa, Unknown
  Description of Unknown: Cas12 sequence
MSHELAEQPSPPKNKEPTCEESDAIRKNRRILLALSWLSVEDDCSAPTGTFRVASGKDSEAERKNKVLTAFRSILTARRMRSQDVESWIADCAASLSAKIREDAVWINRSACFDQRALDLKVLSREYAKAAVMSFFGPLDEYFKLPDEADDTKPAVGGDGPDFRTLARQWVSTNFGTGKKSDSEAIAQNLRKLADANLAPFSGKPKAALIAHLSVELDGSTADIDGLCRAIGWNTGRPSKGRVAIERLPDPPTETSIQTMQQKFREEAEAKASSKGLRQVPEWMPAFQKSIERDCGMPFKLGEGRDHIGEFSVMLDHAARRVSIGHSWIKRAEAERRRFEADAQRLNHIPAAAKDWLDQFVQFRSGSSGAAAAGGEYRIRRRAIEGWDEIIKRWKRAACKSPEDRVAAAREVQADPEIEKFGDIQLFEALAADDAECVWRGDGNGTPDPLKDYVAATDALDKMRRFKVPAYRHPDPLAHPVFGDFGNSRGDIRFAVHEAAKATRGTKRIAKDQKEWIRERHGLRMGLWDGQSVRTADLRWSSKRLVDDLALRNHVTTRRTGPVSRADRLGRAAAGLGADEAACVAGLFELPDWNGRLQAPRAQLDAIAACVAANGGKWDDKARKLRDRIEWLVSFSAKLECCGPFMEYASQNGIQPNGKGEYYPHAERNKGRTGHAKLILSRLPGLRVLAVDLGHRFAAACAVWEALSKIAFDAETKGREVVSGGRAADDLYCHTRHLDCAGKARTTIYRRIGPDKLPDGSDHPAPWARLDRQFLIKLQGEERPARAAGPAETAAVQQIETDLGRARGQEDLPPRPVDSLMREAVRTIRIALRRHGDAARIAYAFKPGAKRLKPGGGAQDHTPETHADAILEALLRWHELATGARWRDPWAETQWKDWVQPHISATLPELANDADRWERKRHRAALEQVLRPVAQMLIQRPTDALHQVWSKHWADEDLKWPSRLRWLRNWLLPRGPRARSGAARNVGGLSLLRIATLRELYQTQKAYAMRPEPDDPRKRIAGRNDDRYDELGRSVLQVIERLREQRVKQLASRIVEAALGVGRAKPTRGRQRPQSRVDVPCHAVIIESLRNYRPDELQTRRENRAIMNWSAGKVRKYLEEACQLHGLHLREVMPNYTSREDSRTGLPGVRCVDVPVDPKLGKPKAYWWNSVLSTARKKSIGDAASHDKQGDATSRFIVELAGCLDRLKADGKPLPKTVRVPRIGGDLFVAAPPTSCTAPAHQPHPACDGARALQADLNAAANIGLRALLDPDFPAKWWYVPCIDDQRGLALPRADKVLGSACFPGDPATFGSLLKTRTAAGPAVDGQAAPDRKPRTGTHRPGSAKSRSLGDGKATTNYWSDRSARDLRPADEGGHWQPTNVYWNWVRKRALLGLYSFNGLSPPSDDRP

SEQ ID NO: 161 - protein, 1108 aa, Unknown
  Description of Unknown: Cas12 sequence
MAIRSIKLKLKTNTGPEAQNLRKGIWRTHRLLNEGVAYYMNMLLLFRQESTDKKTKQEIHEELIRHIRAQQQRNHADEKTQALPLEKALEALRKLYELLVPSSVGQSGDSQIISRKFLSPLVDPNSEGGKGTSKAGAKPAWQKKKEANDPTWKQDYEKWKKRREEDPTASVITTLEEYGIRPLFPLYTNTVAEIAWLPLKSGQFVRTWDRDMFQQAIEGMLSWESWNRRVQEEYAKLEGKMAQLNEQLEGGEEWIRLLEQYEEKREQELRENMTAANDKFRITKRQMKGWKELYEVWSTFLPSASQEQYKEAIKRVQQRLRGKFGDFHFFQYLSEEENRLIWKGNPQRIHYFVARNELTKKLEKAKQSARRTLPDANKHPLWVRYDARGGNLQDYYLTAESDKPRSRRFVTFSQLIWPSESGWLEKKDVQAELALSRQFYQQVTFLKNDKGKQEIEFKDKGSGTTFSGHLGGAKLQLERSVLENKERKFEEGEIGKAYLNVAIDFKPLQEVKNGRVQAPYGQVLQLIRLPNAFPKVRTYKSEELVEWIKASPQHLSGVESLASGFRVMSIDLGLRAAAATSIFSVEESSDKNATKLAYWIEGTPLVAVHQRSYMLRLPGEQVEQHVWEKRDERGDQHKRVRFQIRRLAEIIRLANKQYGDRWDELNRLDEAVSKEKSPLDQADRTFWEGIVSDLTTALPLNDADWTEAVVQIHRKAELYVGKVVQAWRKRFNADERKGIAGLSMWSIEELDGLRKLLISWSRRTRNPQEVNRFEPEHTGHKRLLTHIQNVKKDRLKQVSHAIVMTALGYIYDEKKQKWCAKYPACQVILFENLSQYRSNLDRSAKENSTLMKWAHRSIPKYVHMQAEPYGIQIGDVRAEYSSRYYAKTGTPGIRCKKLREHDVKGWRLDHLKKRLVNEQFLTEAQVEQLKAGDIIPDDSGELFMTMTDGSGGKEIVFLQADINAAQNLQKRFWQRNSELFKVSCRVIVRDEAEYLVPQAKKVQEKLGKGVFVKKSDTAWKEVYVWDSQAKLKGKTTFTEESESPEQLEDLQEMIEEAEEAKGTYRTLFRDPSGVFFPDFVWNTPKDFWGEVKRKLYGKLRERLLTKVR

SEQ ID NO: 162 - protein, 1364 aa, Unknown
  Description of Unknown: Cas12 sequence
MNRIYQGRVTKVEVPDGKDEKGNIKWKKLENWSDILWQHHMLFQDAVNYYTLALAAISGSAVGSDEKSIILREWAVQVQNIWEKAKKKATVFEGPQKRLTSILGLEQNASFDIAAKHILRTSEAKPEQRASALIRLLEEIDKKNHNVVCGERLPFFCPRNIQSKRSPTSKAVSSVQEQKRQEEVRRFHNMQPEEVVKNAVTLDISLFKSSPKIVFLEDPKKARAELLKQFDNACKKHKELVGIKKAFTESIDKHGSSLKVPAPGSKPSGLYPSAIVFKYFPVDITKTVFLKATEKLAMGKDREVTNDPIADARVNDKPHFDYFTNIALIREKEKNRAAWFEFDLAAFIEAIMSPHRFYQDTQKRKEAARKLEEKIKAIEGKGGQFKESDSEDDDVDSLPGFEGDTRIDLLRKLVTDTLGWLGESETPDNNEGKKTEYSISERTLRIFPDIQKQWSELAEKGETTEGKLLEVLKHEQTEHQSDFGSATLYQHLAKPEFHPIWLKSGTEEWHAENPLKAWLNYKELQYELTDKKRPIHFTPAHPVYSPRYFDFPKKSETEEKEVSKNTHSLTTSLASEHIKNSLQFTAGLIRKTNVGKKAIKARFSYSAPRLRRDCLRSENNENLYKAPWLQPMMRALGIDEEKADRQNFANTRITLMAKGLDDIQLGFPVEANSQELQKEVSNGISWKGQFNWGGIASLSALRWPHEKKPKNPPEQPWWGIDSFSCLAVDLGQRYAGAFARLDVSTIEKKGKSRFIGEACDKKWYAKVSRMGLLRLPGEDVKVWRDASKIDKENGFAFRKELFGEKGRSATPLEAEETAELIKLFGANEKDVMPDNWSKELSFPEQNDKLLIVARRAQAAVSRLHRWAWFFDEAKRSDDAIREILESDDTDLKQKVNKNEIEKVKETIISLLKVKQELLPTLLTRLANRVLPLRGRSWEWKKHHQKNDGFILDQTGKAMPNVLIRGQRGLSMDRIEQITELRKRFQALNQSLRRQIGKKAPAKRDDSIPDCCPDLLEKLDHMKEQRVNQTAHMILAEALGLKLAEPPKDKKELNETCDMHGAYAKVDNPVSFIVIEDLSRYRSSQGRSPRENSRLMKWCHRAVRDKLKEMCEVFFPLCERRKAGSAWVSLPPLLETPAAYSSRFCSRSGVAGFRAVEVIPGFELKYPWSWLKDKKDKAGNLAKEALNIRTVSEQLKAFNQDKPEKPRTLLVPIAGGPIFVPISEVGLSSFGLKPQVVQADINAAINLGLRAISDPRIWEIHPRLRTEKRDGRLFAREKRKYGEEKVEVQPSKNEKAKKVKDDRKPNYFADFSGKVDWGFGNIKNESGLTLVSGKALWWTINQLQWERCFDINKRHIEDWSNKQKQ

SEQ ID NO: 163 - protein, 1313 aa, Unknown
  Description of Unknown: Cas12 sequence
MGEENNFSQFTGLYELSKTLRFELKPVWETEKLLIENQVFPKDKIVYESYKKIRPYLDKLHLQFIEESLSSVKLDFNEIEKKFLEWDKEKDKTTKNKLKEEIFWKNKKWWLNSNLRKDMVSYFNLNWKKWINNFENKTIVNEKWKEEKIKIKWEWYKILLSDSNLNILSDFFTQEKEWDNVLIEKYIENPNFKENDWEKKFILEKQNLFKSFKWFTTYFTNFNHSRENFYKDDWKSWRIATRIIDENLIFFLKNKKAFDEKYKNNSEITVKFNEKLLNFWEKLEDFFSLDFYNRCYTWKQIEYYNQLIWELNSVVNHEKQAKFSEYTQNKKVSENNKFNKYDFPIFKELYKQILSEKATEQKFIEINDFKELKQNLQELIEKNKQKNKFAINLTKSLIEKIDEYDFEKIYISKLSLNTISSKFFWSNKWFFIQENLEKNIWKKNKNWKIDLPDFIKLSDIKTALENFNKILFEDKENKENIFKEEFDNITENNIFIKFMKIYENEFINLIEWKKNNKWDYEIIWYNKSLLDLEKNILNISDFSDKKEEKEKQIEYIKKYLDSSLNIYRVMKYFALEKGKESVEWEFETDDIFYNEFKKFYIDNEIISYYNEFRNYLTKKPYSSNKLKLNFENWTLIDGWDKNKEPDNYWTILRKNWKYFLALQIKWKNNIFYKKKWSWVIDIEEAYKIDLWDEFYEKMDYKFLPDPKKMLPKVIFAKSNVKLFNPSKEILQIKENETFKTWDKFKVNDFYKIVDFYKENIIKYPDWKIFNFKFSDTKTYNNLSDFYKEIELWSYDLNFRKVSKKYILKSIEEKNIYLFEIYNKDFADWKTWSENLHTMYFKWLFEENNLNNIVLKLNWQAEIFRREASLKEKEVNRAKENKEKSHNIIENARYTKDKLFFHCPIKLNFAKHNEKINQEILKYISDNKEINIIWIDRWEKHLAYYSVINRDWNIIKDKNWNLVKWSLNIVWNNQNYHDKLETREKERQDARWSWKTIWNIKDLKQGYISQVVHKLAELVIEHNAIIVFEDLNSWFKRWRQKIERQVYQKLEKALIEKLNYLTFKDKNFWENWHYLKAYQLTAPFETFEKVWKQTWVIFYTDPSYTSSTCPACWFRKDLYLKYSNLKNALWDIEKIDSIIFDWKRFIFEYNNKKVFTDRDRKRNISSEESWIKWWKTIDNNITEFLEILFKKSNIDYTSWNNLILDIQEINEKELYKWVFDNFNAILNIRNSTIKDNSRTWDFICCPACDFDSRKENKIWIENWDDNWAFNIARKWIIILNKIDSYLNEKWSLDKILWWDMIVKQIDWDDFTHKK

SEQ ID NO: 164 - protein, 767 aa, Unknown; identical to SEQ ID NO: 112
  Description of Unknown: Cas12 sequence

SEQ ID NO: 165 - protein, 1313 aa, Unknown; identical to SEQ ID NO: 163
  Description of Unknown: Cas12 sequence

SEQ ID NO: 166 - protein, 1500 aa, Unknown
  Description of Unknown: Cas12 sequence
MATAINYPTTQRAYTLRLRGIDPQDQSWRDALWATHEAVNRGAKVFGEWLLTLRGGLDHQLADAPVKVRGGTTRLPSDEERRDRRVLLALSWLSVEDAHGAPPDASLIVAKGTDSADCRARKLADALIAILQARSVAASEIGDPSKPPEDQPGTWLGDCMGSLSAAIRDDAVWVNRSKAFDAATQSCPSLTRDEIWDFLEPFFASPDAYLKPERAESDEGDSTSAATEDKAKDLVQKAGGWLSKRMGAGGGANFQDLARAYQAIAQWASSAQPGQSAQQAVGSLAGYLSQHGFSPTANDATGVLAVISGPGYKSATRNHITAIATSPEITPQDLSKLQELATKDKAGCSSKIGGKGPRPYATMILQQVEAACGFTYLQSDGPARHREFSVMLDHAARRVNVAHSWIKNAEAERRQFESDARRIKKVPQDALNWLRGYCEERGGASGSLEGYRIRRRAIDGWDQVVIRWSRSDCQSADDRIAAARQLQDDPEIDKFGDIQLFEALAAEEALCVWKPDGNPTAQPLKDFVAATEADAKKKRFKVPAYRHPDPLRHPVFTDFGNSRWGIEYSAHRAPAKCDELGQQVDRLTQAVAEAQRNLDGATAAQRASRESKLAEAQSKLVAAQTEFAAINDPHRVELKLWNGQAVAAIPMRWSSKRLIADLSLRRATQPSSDQRIGVTRADRLGRAAGNADDGRPVTITGLFQQDHWNGRLQAPRAQLDAIAKHVDKHGWDAKARRQIARIRWVVSFSAELSQQGPWFEFCHRFGEDAPARPFVSRHGEYAVKHRDNDQRKGHAKLILSRLPGLRVLAVDLGHRYAAACAVWEAISSDQMRQACAAANAPAPHPLAMYIHLKSTTAKGKPTTTIYRRIGPDKLPDGTPHPAPWARLDRQFLIKLPGEDRPARAASPDEIKAVEDFEDSVGRVRTAVDPPRKRGVDLLMHDAVRTARLALARHGRRARIAFQLISQVRILPGGRPQTLDDAGRRDLLNDTLADWYALATDSRWTDAAARQLWNERLAALNGGFTIDPPADASQPEAERTRAQRRQAEQELRHRLASLVEALFCNPTLCQQLHQAWTDRWNADDQQWRSRLKWLSRWLLPRGGSRRDGSRRHVGGLSLTRISTLIDFRRKVQVGYFTRLRPDGSRAEIGPQFGQSTLDAIQRLKDQRIKQLTSRIVEAALGIGVEQDRIWDAAKRKWRTVKRPREPRYHVDDQGVQQRDPRFQACHAVVIEDLSHYRPEETRTRRENRATMDWKSAETRKRLADHCQLYGLHLRDVNPQYTSRQDSRTGAPGCRCVDVSVADFLTKPAWRKQVAQARGKVASNRGDARDRLLVELDHQLTTANSLRGEMDSLRIPVNGGEVFVSADPRSPLAAGIQADLNAAANIGLRALMDPDFLGTWWYVPCDPSTKKPHIEKVKGSILATVGALQATSEEAAAPPRRGRGGTRSAAPREVINLWRDPSAVRIQDATAGEVWDVTPVYWSIVKDRVVDVLRQRNTKSGD

SEQ ID NO: 167 - protein, 1202 aa, Unknown; identical to SEQ ID NO: 103
  Description of Unknown: Cas12 sequence

SEQ ID NO: 168 - protein, 1397 aa, Unknown
  Description of Unknown: Cas12 sequence
MAAFQRSYTMNLKPATSEQDKFILWNRLFLTHWSVNEGAKIFGELFLNLRGGLSPELGIFDLNKDKDDRKKKALVMGRRRLLALGWLSVEDNLSAGDHPFRIREIPVGRNMEIKQATTLLTEILKNKGVKDEAVIKEWIDDCTPSLIANIREDAVWINRAKSFYSMNPCPTKDEVWKILSYVLNTSFLDLSLNDSSERDNTKNKKGTKENEKDVSNKSKELYGWLFTKNPNKMREAGENKDKFINNFRENFNTFTDYANLKVEIELWRKNNISNTLLITQKAKYPPEVKEANHPSKFSVGYRKLLVHLELWPSSKDENGDIPKGIEGKDKSHNQILLDYLLEVCNEGNKTTKKVIVPAWADGIKTELESKASIKVGDSTSSVLQRLMIKMAARRISQTLSWIKINEQVRHDAYQKKNKAFKLLCEIDKNGEACKWLENYELFRRDDSGGEEYHISARAISCWKQILEEWQKNDSSKALREKVKVVQAAEDKFGDARLFEDLADDNARSVWLLPDGNKTPDILNWWCEYRTADIDESRFKIPCYCHPHPFKHPVYVEYGKSNPQVIFSLKHDKARKNRIDNGWNPKNPRILALLLLDIVRQKSTLAPFVWESKRLWKDLGGDATVTYKIPRSDRMGLSSIGNIDYARPEVPFLKEKWNARLQSDRRTLEKLEKYWNPESMKWIDDGKFLIQSKWFITFGPDMETAEGPWKLYLKENINDNNYLGNRSKENQKRGYRAKKLLSGYPAGMRILSVDLGHRYAASCAIWETITKKQITEELAYQPDKNSVFEHSCKTIDKKIKNTVYRRIGDDSIDAPWAKLEKQFTIKLQGEDKSCYLLRSDEKELFRSILSKLSCLNNDTGHNILEMIENLLRIVKAKIYRQGILARISYSMTAQYKPGKGGQKSPLSDEDKIHYLSENLAAWSALMGNQEWNEDGISDWYKKYISHLVSGPKPKEGNRKSDRDKIIEYFLPAARKLYDDNETRINIHDLFKELWDENNKQLSAVLKEIKKIILPKGIRYFDKNNDSSSRWKNNQSKLKQITHRGGLSLRRIVAIEGYYKLAKAYKNHPEPDNLTKNIPLPGDNSSAGFNQRIRDTLERMKEQRVKQIASRIVESALGLGIEGYKKRPLTPESKPCQAIVIEDLSHYRPDELQTRRENRRLMQWSSSKVKKYLSEACEMHDVLLVEISPEYTSRQDSRTGVAGLRCIDINIREFLKDSSSWQNKIKTIQMKPTNKKSNLDQYLIELNESLGERYKDKVIPSDKFVRIPRKGGDIFVSSSKESPVSKGIQADLNAAANIGLKALLDPDWAGAWWYILIEAKSNHVIPYGKKYKGAECLRDFKFSGLENQVMKNNMNLWRDLQSQFSSEDKWMSYKEYNELTEKRVINILRERAGLELIEE

SEQ ID NO: 169 - protein, 1203 aa, Unknown
  Description of Unknown: Cas12 sequence
MPTRTINLKMVLGRKDDTAELRRALWTTHEHVNLAVAEVERVLLRCRGRSYWTLDRRGDPVHVPESQVAEDALAMAREAQRRNGWPVVGEDEEILLALRYLYEQIVPSCLLDDLGKPLKGDAQKIGTNYAGPLFDSDTCRRDEGKDVACCGPFHEVAGKYLGALPEWATPISKQEFDGKDASHLRFKATGGDDAFFRVSIEKANAWYEDPANQDALKNKAYNKDDWKKEKDKGISSWAVKYIQKQLQLGQDPRTEVRRKLWLELGLLPLFIPVFDKTMVGNLWNRLAVRLALAHLLSWESWNHRAVQDQALARAKRDELAALFLGMEDGFAGLREYELRRNESIKQHAFEPVDRPYVVSGRALRSWTRVREEWLRHGDTQESRKNICNRLQDRLRGKFGDPDVFHWLAEDGQEALWKERDCVTSFSLLNDADGLLEKRKGYALMTFADARLHPRWAMYEAPGGSNLRTYQIRKTENGLWADVVLLSPRNESAAVEEKTFNVRLAPSGQLSNVSFDQIQKGSKMVGRCRYQSANQQFEGLLGGAEILFDRKRIANEQHGATDLASKPGHVWFKLTLDVRPQAPQGWLDGKGRPALPPEAKHFKTALSNKSKFADQVRPGLRVLSVDLGVRSFAACSVFELVRGGPDQGTYFPAADGRTVDDPEKLWAKHERSFKITLPGENPSRKEEIARRAAMEELRSLNGDIRRLKAILRLSVLQEDDPRTEHLRLFMEAIVDDPAKSALNAELFKGFGDDRFRSTPDLWKQHCHFFHDKAEKVVAERFSRWRTETRPKSSSWQDWRERRGYAGGKSYWAVTYLEAVRGLILRWNMRGRTYGEVNRQDKKQFGTVASALLHHINQLKEDRIKTGADMIIQAARGFVPRKNGAGWVQVHEPCRLILFEDLARYRFRTDRSRRENSRLMRWSHREIVNEVGMQGELYGLHVDTTEAGFSSRYLASSGAPGVRCRHLVEEDFHDGLPGMHLVGELDWLLPKDKDRTANEARRLLGGMVRPGMLVPWDGGELFATLNAASQLHVIHADINAAQNLQRRFWGRCGEAIRIVCNQLSVDGSTRYEMAKAPKARLLGALQQLKNGDAPFHLTSIPNSQKPENSYVMTPTNAGKKYRAGPGEKSSGEEDELALDIVEQAEELAQGRKTFFRDPSGVFFAPDRWLPSEIYWSRIRRRIWQVTLERNSSGRQERAEMDEMPY

SEQ ID NO: 170 - protein, 1097 aa, Unknown
  Description of Unknown: Cas12 sequence
MVTRALNLKLVVPRRPGELTKAEALWSTHDIVNRATSYYESQLLLCRQQDYQTRELTVSAGDQAPDLDALIANARDRNRYRGLEKPQVVREKLRNLYEAIVPPAIGKTGTAQAVGAFVSPLLDADSRGFTEIFDKIEALPNWVDGVRAEEPDALEAAADWLKSPQGKERLRPTGAPPTWIKLAKKKDAGWAAAFVADIDKKLKEVEGTPTLMQELRALGVMPLFPSFFASRIAGHKGAVSTWDRLALRLAVAHLLSWESWVELAAKEHAARVAKLEKFRDDNILGEIADAVEALRLYEKERTEELQQKAQLDAEEVRTTSRTIRGWVDLREKWLKTDASPDALISLVAAEQKRKSGKFGDPQLFRWLAKPENHFVWNKPDFDPPSLFASLRMIEGLVERSKETAWMTLPDARLHPRSSQWEPHGGGNLKTFRLEQGEGGSLSVTLPLLRKSGDDSYVEEEHAFSLAGSKQIPNASLDVRRNKYCLSYRTPTGEEAEAVVGSADLLLDWYFLQQRSEHRPEEGDIGPAFLKLALDITPIDPVWGEREKTPAIHHFKTASGKNTRHADGVAPGFRMLAVDLGIRTLATCSVFELKATAPAGRLSFPIAHLDLHAVHERSFTLTLDGEDPDRDAERWRENKSAELRRLRMGLTRYRNIRNMREDAPDEREVLLEDLQEKVQEHGWAFEEPLLRELAKHKDTPEPIWEAELTKALAQFRSDFGVIVGEWRRSNRARSTDSHAGKSMWAIDHLTNSRRFLMSWSLLSKPGQIRRLDRDKQGVFAKHLLDHLEGLKADRLKTGSDLIVQAARGFRRDKRGNWHKAYKPCHGILFEDLSRYRMRTDRPRRENSQLMKWAHRAVPKEVGMQAEVYGIRVEDTGAAFSSRFHAASHTPGIRMHPICQKDLENEWLLDEIEKQNSGVKRRELKLGQLVQLNGGELFACVTASGVKTLHADINAAQNLQRRFFTRHGDAFRIVARKVLVDEEEVWVPRSLGKRLLGALGSHGKLVPTGHESGSCRFEEITTRAWSKLSGEKLSDDRVGNEEDQIIASIEEEALERTGEVVVFFRDPSGQVLPRDLWYPSKTFWSIVKSTTLSKLKAAP

SEQ ID NO: 171 - protein, 1272 aa, Unknown
  Description of Unknown: Cas12 sequence
MEDKQFLERYKEFIGLNSLSKTLRNSLIPVGSTLKHIQEYGILEEDSLRAQKREELKGIMDDYYRNYIEMHLRDVHDIDWNELFEALTEVKKNQTDDAKKCLEKIQEKKRKEIYQYLSDDAVFSEMFKEKMISGILPDFIRCNEEYSEEEKEEKLKTVALFHRFTSSFNDFFLNRKNVFTKEAIATAIGYRVVHENAEIFLENMVAFQNIQKSAESQISIIERKNEHYFMEWKLSHIFTADYYMMLMTQKAIEHYNEMCGVVNQHMKEYCQKEKKNWNLYRMKRLHKQILSNASTSFKIPEKYENDAEVYESVNSFLQNVMEKTVMERIAVLKNNTDNFDLSKIYITAPYYEKISNYLCGSWNTIADCLTHYYEQQIAGKGARKDQKVKAAVKADKWKSLSEIEQLLKEYARAEEVKRKPEEYIAEIENIVSLKEVHLLEYHPEVNLIENEKYATEIKDVLDNYMELFHWMKWFYIEEAVEKEVNFYGELDDLYEEIRDIVPLYNKVRNYVTQKPYSDTKIKLNFGTPTLANGWSKSKEYDYNAILLQKDGKYYMGIFNPVQKPEKEIIEGHSHPLEGNEYKKMVYYYLPSANKMLPKVLLSKKGMEIYQPSEYIINGYKERRHIKSEEKFDLQFCHDLIDYFKSGIERNPDWKVFGFHFSDTDTYQDISGFYREVEDQGYKIDWTYIKEADIDRLNEEGKLYLFQIYNKDFSEKSTGRENLHTMYLKNLFSEENIREQVLKLNGEAEIFFRKSSVKKPIIHKKGTMLVNRTYMEEMHGESVKKNIPEKEYQEIYNYMNHRWKGELSAEAKEYLKKAVCHETKKDIVKDYRYSVDKFFIHLPITINYRASGKEALNSVAQRYIAHQNDMHVIGIDRGERNLIYVSVINMQGEIIEQKSFNVVNKYNYKEKLKEREQNRDEARKNWKEIGQIKDLKEGYLSGVIHEIAKMMIKYHAIVAMEDLNYGFKRGRFKVERQVYQKFENMLIQKLNYLVFKDRSADEDGGVLRGYQLAYIPDSVKKLGRQCGMIFYVPAAFTSKIDPATGFVDIFNHKAYTTDQAKREFILSFDEICYDVERQLFRFTFDYANFATHNVTLARNNWTIYTNGTRTQKEFVNRRVRDKKEVFDPTEKMLKLLELEGVEYQSGANLLPKLEKISDPHLFHELQRIVRFTVQLRNSKNEENDVDYDHVISPVLNEEGKFFDSSKYENKEEKKESLLPVDADANGAYCIALKGLYIMQAIQKNWSEEKALSPDVLRLNNNDWFDYIQNKRYR

SEQ ID NO: 172 - protein, 767 aa, Unknown; identical to SEQ ID NO: 112
  Description of Unknown: Cas12 sequence

SEQ ID NO: 173 - protein, 1147 aa, Unknown; identical to SEQ ID NO: 4
  Description of Unknown: Cas12 sequence

SEQ ID NO: 174 - protein, 687 aa, Unknown; identical to SEQ ID NO: 147
  Description of Unknown: Cas12 sequence
  MOD_RES (156)..(527): Any amino acid

SEQ ID NO: 175 - protein, 1212 aa, Unknown
  Description of Unknown: Cas12 sequence
MIKKSNFWQFTGLYELSKTLRFELKPVWETLNILEKDWVSQKDKEVEENYNKIKVFFDSLHREFVKQSLENWYLELLENFYNSYIELNKNIENKKNKSLQKLFEKSSKELKKELVSFFEWKWNDWKQKYSFLKKWWIDVLNEKEVLDLMWEFYPKEKELFKKFDKFFTYFSNFKESRKNFYADDWRAWAIATRVIDENLITFIKNIEDFKKFKNNFSDFIENGFSDWKIKINWFTLEEKQVFDLDFYNNCLLQDWIDNYNKILWWFSEENWNKIQWINEKINLFKQNQNKTNSKDVKFPRFKLLYKQILSEKEKLIFVDEIENDEKLINFIKESKNNNLIKVEKAIEITENFIKNNETFELDKIYLSKISINTISNKFFSSWDYILKEGFDKWEIKEFISFEDLKNAFGKIKYENLEDIFKSNYITDYIAINWEDLYKNFLNIFLYEFKQNINEINFYNSELEKLFLEKFEKTETQVQIIKNYFDSVLSLYKMTKYFALEKGKKKIEDLETDNNFYNDFFVYYEDFEIWKDYNLVRNFITKKQVKTDKFKLNFENSQFLTGWDKDKEKERLWIILKKDEKYYLWILKNNKIFNSYNYESWDFYEKMSYKQLNNVYRQLPRFAFSKAKREVYWITPELEQIKEEFDIFQKNKEKWEKFDIEKLKKLINCYKKWFIKTYENEFDLEKIKNTDYLDLATFYDEIEQKTYKIDFNKISENFINAKVNSWELYLFQIYNKDFSETKKAWSKENIHTKYFKLLFDEKNLEKLVIKLSWWAEMFFREKTEKLKTKLDKSWKEVLEHRRYSKDKIMLHLSITLNANKWDSFWFNKMVNEYLNKNEDIKIIWIDRGEKHLAYYSVIDKNWKIEEIDTLNIIKSSDWKITNYLEKLEKIESSRKDSRVSWWEIENIKELKNGYISQVVNKLAELIIKYNAIIVFEDLNIWFKRWRQKIEKQIYQKLELALAKKLNYLTQKDKNDNEVLWNLKALQLVPKVNDYQDIANYKQSGIMFYTRANYTSTTCPCCWFRKNIYISNSDTKEKQKKDFEKIDIKFDGEKFIFSYEIIQDKKAKQKSNKTNFSVNSNFSRFKYNSKKMLVEEVNLNLELQNLFKDIDLKWDINKQILEKDSYFYKSLTYYFNLILQLRNSDSKNDIDYITCPSCNYHSKDWFQGLEYNADANWAYNIARKWIIMLDRIEKNFEKPDLYVSDIDWDNFTQK

SEQ ID NO: 176 - protein, 1212 aa, Unknown; identical to SEQ ID NO: 175
  Description of Unknown: Cas12 sequence

SEQ ID NO: 177 - protein, 1108 aa, Unknown; identical to SEQ ID NO: 33
  Description of Unknown: Cas12 sequence

SEQ ID NO: 178 - protein, 688 aa, Unknown
  Description of Unknown: Cas12 sequence
  MOD_RES (276)..(564): Any amino acid
MAESMYNQQNINQKSTETPTEEDALGIKNPLLTPTTLGQNFLSLQSISPLGSRSINLINWSLISPNQTLLQNFQDNENWQDSSISEFRPFSKNSLTENSPIIEPQSDKTLPSSVPIQLSSELPIQQPPETSFIDSESPIPQPPETPSSDSESPIGQTENIFPFQIDQKTRRNSVIQNSKSSISHFFQKKSEFPREKISQENVNKLTKKSAENQDISTTEESVINSIETNDLQTINPTDIPNPEIPVSTLQKQPDSTIDNIPQTESVSTINPTDIPXXXXXXXXXXXXXXXXXXXXXXXXXXXXXXXXXXXXXXXXXXXXXXXXXXXXXXXXXXXXXXXXXXXXXXXXXXXXXXXXXXXXXXXXXXXXXXXXXXXXXXXXXXXXXXXXXXXXXXXXXXXXXXXXXXXXXXXXXXXXXXXXXXXXXXXXXXXXXXXXXXXXXXXXXXXXXXXXXXXXXXXXXXXXXXXXXXXXXXXXXXXXXXXXXXXXXXXXXXXXXXXXXXXXXXXXXXXXXXXXXXXXXXXXXXXXXXXXXXXXXXXXXXXXXXXXXXXXXXXXXXXXXXXXXSKNNRIPQLITFLKLNQYQQLILQIFLTQKFSFQLSKNNRIPPLITFLKLNQYQQLIPRVLLHQKFLFQLFKNNRIPPLITFPKLNQYQQLIPRIFLTQKFPFQISRNNRIPQLITFPKLNQYQ

SEQ ID NO: 179 - protein, 1003 aa, Unknown
  Description of Unknown: Cas13 sequence
MGAIKNKHIFAAYANLAIDGLIKTLNFIAKKLDTQKQLSSWDIKHVITLIDSIFDQNPQNNLEQVVEGYLPWIKPIIEMKTPKKGERQSDKLCIEYKTIITAFASLLNDVRNYYTHYYHDPICIYPGGYDIPSSLNCIYDSAINIIKERFQAEEKEMEHLRRYTRKKGRVVLKTEDDHFYYTLANNNDLSEKGYAFFISMFLERKYSYLFLKKLSGFKRGDSLQYRLTLEVFTALSTKPPVERLRTTKDTKQDRALDILNELSKIPIELYQTLEPKYREMYNETLQPTDAEDPYGLPDRSRIRFRSRFEAFALHFLDKQADFKEIGFYTYLGNYFHNGYQKTRVDRETKDRYINFQLAGFCKNIQDISAKKLSEALNVKSIDISTDSIPDINSFEPYLVQSTPHYIVNGNNIGIKVLPEGKDTYPTIDEKGAKMPIADFWLSKYELPAMLFYTYLRNNNIHKSHCPLSVKDIIERSIHKSTKQKHPEERSELMLRRVMKAIFWTDSKLNEVERIKSQKSAFGKRQHEILKAGRIAETLVRDMLWLQPSKNNGRDKVTEPNFQAIQVSLAYFGIRRNDLTEIFTRAGLINSSNPHPFLAQIGTNYTSLIEFYIAYLKERKVYFSRIQKKILQGKLNIQCHPLRDLQREPNKPQDKEEAIFLPRGLFNEAIINCLKKSKLKQLIESPTREKSPALNVSYLIQNYFRTYFEDQSQEFYAQPRNYRLFDKLSPNKGKSKSYLSLEQRIKKMEELRPSKIPVAEANKLLEKEDRLYRKNYNEICDNESIIRLYQIQDILLFMMTKEYLPSDLYNRINKYKLENVKGILNERVSYLIDLNPLKIQGEDIKIKDYGKLFYIHHDTRISSLNKVLSKVKRNNSISSSVKIQPYENYKRECLDFEEAQIQIIPIIHSFEIAMVSMFPDLKKATPGNYYDFNELITEYEKRTKQKIGSSFLIKTRNMFLHDKYEAECIKEISDDFVYAKKIIAEFKMKIENIKLEDLSNDSSA

SEQ ID NO: 180 - protein, 986 aa, Unknown
  Description of Unknown: Cas13 sequence
MARDNFLNTIKLLADKMKLGAISGFGKDGNEVNDINKLFGDKNTYANIENVVEFYFPWIKALEGRFSLDKGDRNLNDMKMFYKSVLTAFFTAVDSLRNKYTHYSHKDLNIREIKIECTLGGKDYCIGLLNALDCIYDSAVNLLKLRFMVGEDEVAHLRRCKAVNKKVVVRTEKDGFYYRLSDNGGVTEKGVIFIASMFLNRKYGFLFLKQLEGFKRSDEKRYRLTLEAFLAFSNIKPVDRLKSDKLDRASLGLDMLNELTKIPKELSETLSVDCLYKYLASDGEDDLRSRIRYQDRFVPLALEFISQSDEFKDFRFYTYVGNYVYKGYIKRLIDGTDKERYLSDRLCGFYKSVNDASSDAIAQKYGVEIKDSNEPDYMLPDSFRPHVLRATPHFVINNNNIGIKICGNDCLPIVNGKGVESPEPDYWLSIYELPAMLFYAYLREKNGKRFKDYKSIRELIEGVEKKADEKNDRDKGALMARHIDKEIIWTQTKLDEVKRLEEKKVAAYGKKGRVVLKSGRMADLLAHDMVRLQPATKGSDKITGVNFQALQVSLAYFKRDILADVFSRAMLTTGNHRHPFLYRIDVSHCSSLRDFYVAYLGERRKYFEDVAKKIAKNKLNTPCHILRRLQREGSGEEAGKDVKPKFLPRGIFTDSIKNCLEQSKLNIYIRNARNDVKPAINAAYLILMYYKEIEKGEFQGFYGEKRRYDILEEGKPLDLAERKKALASIKPAKIDVSEANMPMSKEEHLMRKRYHAVCNNESAIRMYQVQDILLLLMAKDIFKKALSEGVMSKKIGLENLNGIFDAPVNFVKNFDNIKLTATGIKIKNYGKVCRLGTDFKFNSLIKAFHKVYSKSVEMDYSDYLKEEEEFEKYRLNMVKLCREVERGITEDLHLSLDGKSHLSFNDDVIKPYNDKYNVFNGDDLTFFINARNMFMHGDYKYECVKYVVSEHFKGSLNDVSFAKETYGHFCNLLESMRKKTGLRIDI

SEQ ID NO: 181 - protein, 1009 aa, Unknown
  Description of Unknown: Cas13 sequence
MKKKISLKEQRNTKKAENKLKYQKAQAERAAAAQQTAAGAESEENPCFDVVKDTKRKALNPLHVEIEAPSAKKSSVKANGLKSLLLTDGKTVMTSFGRGSEANVEKRFDETGTKTFDRDPELFSAKPLETGYRIQRFNASPKDAGLAYRPAGVRPDQIGAKAALEKRYFGKETPGDNIHVQIAYQIQDIEKLLAVYISNIIYAVNNVTGVSAMKDSKGRPVDLLGDYGILGEEGLTKRLQRIPEQADEEAKALQAFLCSERLSYFGKEFCLVRNSPKQPDKEEKRQYKLMRVLCLLGELRQFLVHGKKKEKEFAWLYRLDRQLSQEYRKLLGEFYDAQVDKVNKSFLTNSTVNLEVLFRALKTGTDPERKTVTQEYYQFTVRKEDGNLGFSLKTLREILLSAYKHEVRDKEYDSIRHKLYQLFSFALYHYYKTGVGAERREAFVAKLRAVMTAEAKQRAYADEAAEIWNDEGSGIRAAFLEILEAVDFGSAVKGIKARSSVAGDKRFAEWLEEVRIRPEGVSCFTKLMYLLTRFLDGKEINELLTGLINKLENIQSFLDVMQQEHAETGLSDAFSFFEYSGEIAAELRMTRSFARMAAADPEAKRFMVVDGAKLLGFNPKDTESEDEGIIRAIYGDACAEYLQFSEEEKEAFYVQEGLYGKEREKFSPYAYFHTDTSLRNFIAKNVVESARFRYVIRYVSPEIARKYARQEALVRFALHRVPLLQLRRYYQSCCGPKKDPDAAECVDFLAGVVNRVDFANFTDVRTGDSSKSEQEKKQKYQAIVGLYLTVVYWIVKNLVNVNSRYVMAFHILERDTVLLEGKRLFVGGMKAEDPFLLTDGYVSRQDAYVRKRIGENKRANRHGLNCVLENRNALGSDPASTDAAASLIWSYRNAAAHLTAVAAAQEYVSELREIHSYFEVYHYAMQRYLKSGAEFAELVSKNGPASGKIAAWANAVDRCHSFCKDWLWLLNVPFAYNPARYKNLSIANLFDKNEAAPVTEDASEQKEDE

SEQ ID NO: 182 - protein, 1003 aa, Unknown
  Description of Unknown: Cas13 sequence
MGAIENKHIFAAYANLAIDGLIKTLNFIAKKLDTQKQLSSWDIKHVITLIDSIFDQNPQNNLEQVVEGYLPWIKPIIEMKTPKKGERQSDKLCIEYKTIITAFASLLNDVRNYYTHYYHDPICIYPGGYDIPSSLNCIYDSAINIIKERFQAEEKEMEHLRRYTRKKGRVVLKTEDDHFYYTLANNNDLSEKGYAFFISMFLERKYSYLFLKKLSGFKRGDSLQYRLTLEVFTALSTKPPVERLRTTKDTKQDRALDILNELSKIPIELYQTLEPKYREMYNETLQPTDAEDPYGLPDRSRIRFRSRFEAFALHFLDKQADFKEIGFYTYLGNYFHNGYQKTRVDRETKDRYINFQLAGFCKNIQDISAKKLSEALNVKSIDISTDSIPDINSFEPYLVQSTPHYIVNGNNIGIKVLPEGKDTYPTIDEKGAKMPIADFWLSKYELPAMLFYTYLRNNNIHKSHCPLSVKDIIERSIHKSTKQKHPEERSELMLRRVMKAIFWTDSKLNEVERIKSQKSAFGKRQHEILKAGRIAETLVRDMLWLQPSKNNGRDKVTEPNFQAIQVSLAYFGIRRNDLTEIFTRAGLINSSNPHPFLAQIGTNYTSLIEFYIAYLKERKVYFSRIQKKILQGKLNIQCHPLRDLQREPNKPQEKEEAIFLPRGLFNEAIINCLKKSKLKHLIESPTREKSPALNVSYLIQNYFRAYFEDQSQEFYAQPRNYRLFDNLSPNKGKSKSYLSLEQRIKKMEELRPSKIPVAEANKLLEKEDRLYRKNYNEICDNESIIRLYQIQDILLFMMTKEYLPSDLYNRINKYKLENVKGILNERVSYLIDLNPLKIQGEDIKIKDYGKLFYIHHDTRISSLNKVLSKVKRNNSISSSVKIQPYENYKRECLDFEEAQIQIIPIIHSFEIAMVSMFPDLKKATPGNYYDFNELITEYEKRTKQKIDSSFLIKTRNMFLHDKYEAECIKEISDDFVYAKKIIAEFKMKIENIKLEDFSNDSSA

SEQ ID NO: 183 - protein, 985 aa, Unknown
  Description of Unknown: Cas13 sequence
MGAIENKHIFAAYANLAIDGLIKTLNFIAKKLDTQKQLSSWDIKHVITLIDSIFDQNPQNNLEQVVEGYLPWIKPIIEMKTPKKGERQSDKLCIEYKTIITAFASLLNDVRNYYTHYYHDPICIYPRGYDIPSSLNCIYDSAINIIKERFQAEEKEMEHLRNYTLVNNNGLSEKGYAFFISKFLERKYSYLFLKKLSGFKRGDSLQYRLTLEVFTALSTKPPVERLRTTKDTKQDRALDILNELSRIPIELYQTLEPKYREMYNETLQPTDAEDPYGLPDRSRIRFRSRFEAFALHFLDKQADFKEIGFYTYLGNYFHNGYQKTRVDRETKDRYINFQLAGFCKNIQDISAKKLSEALNVKSIDISTDSIPDINSFEPYLVQSTPHYIVNGNNIGIKVLPEGKDTYPTIDEKGAKMPIADFWLSKYELPAMLFYTYLRNNNIHKSHCPLSVKDIIERSIHKSTKQKHPEERSELMLRRVMKAIFWTDSKLNEVERIKSQKSAFGKRQHEILKAGRIAETLVRDMLWLQPSKNNGRDKVTEPNFQAIQVSLAYFGIRRNDLTEIFTRAGLINSSNPHPFLAQIGTNYTSLIEFYIAYLKERKVYFSRIQKKILQGKLNIQCHPLRDLQREPNKPQEKEEAIFLPRGLFNEAIINCLKKSKLKHLIESPTREKSPALNVSYLIHNYFRAYFEDQSQEFYAQPRNYRLFDKLSPNKGKSKSYLSLEQRIKKMEELRPSKIPVAEANKLLEKEDRLYRKNYNEICDNESIIRLYQIQDILLFMMTKEYLPSDLYNRINKYKLENVKGILNERVSYLIDLNPLKIQGEDIKIKDYGKLFYIHHDTRISSLNKVLSKVKRNNSISSSVKIQPYENYKRECLDFEEAQIQIIPIIHSFEIAMVSMFPDLKKATPGNYYDFNELITEYEKRTKQKIDSSFLIKTRNMFLHDKYEAECIKEISDDFVYAKKIIAEFKMKIENIKLEDLSNDSSA

SEQ ID NO: 184 - protein, 1082 aa, Unknown
  Description of Unknown: Cas13 sequence
CILDFFTQDKAIAEYQLGVEFLQKNLPVIRYLYLPTSHKRFENVPKNQLISEQRNYFKNSLKVLKNLIRDYRNFYTHHFHKPIPVFPETYKLLDDLFLAVANDVKKHRMKTDASKQLLKKGLIEELAQLEKLKLEDLKKLKREGKKVNLNDKEAITNAILNDSFSHLLPKENTISKYYSAVPTEDIDTENGVTISESGIIFLLGLFLTKKQSEDLRSRVKGFKAKLIVNPENPINKKNNSLKYMATHWVFGYLGFKGLKNRFTTTFTKDTLLAQIVDELSKVPDELYQVLPEELKNEFLEDMNEYLKEENSESLDKATVIHPVIRKRYENKFAYFALRFLDEFVDFPTLRFQLHLGNYVHDKREKPIEGTKYVTERIVKEKIKAFAKLSEAAQLKQKYFEEKENHQSIGLQLYPNPSYNFVGNNIPIHLNLNEHFFPKEVKIVAGRLKKRNSSYKSDHPEEYKVRTDNKIKPDAILQDLGKPEKLAPVAMLSLNELPALLHLVLTKKTPEEIEIIIAQKIAERYNVLTNYKAGDDISKGQITKNLLKAKQKKEVNLDKLQLAIEKEIAVTNDKLQTIALHIKERNDPKQKRKYVFTNKEIGLQVTWLANDLKRFMPKGSRQNWRGQHHSQLQKSLAFYDIQPKEPLSLLEEVWDFKNEAYLWNNGIRRSFDKRDFISFYTSYLNNRKETFQRFKDQLNGIRSNKKILDKFIKQQHLWNLFHKRLYVIDTIEEQVEKLLVKPMQFPKGVFDHKPTYIKGKSIQENPECFADWYVAWNQHTDYQKFYSWDRDYKSAYLSGEQEKTEKRFIRVQGSKINKVKQQDVLLAKMASIIFNELYLPEDAEHLDLNLSDIYKTQTERKAEIEAALIQSHKTTGDNSANIIKSTSAWTLTVPYCSKNIYEPQVKLKELGKFKKFIASQKVQTLFEYKPQKIWNKTELEEVLELKANSYEVIRRDYLLKSIQEFEKYMIKKLPTLIDTNEHPNFNKYLTTFLKSLELVSEEDAKWLISKKDFDTTPIDELKKQSKIMEKAFLLVMIRNKFSHNQLPRKIYYDEIYKNVPNAVSINFNELFLEYTNQTILEFK

SEQ ID NO: 185 - protein, 708 aa, Unknown
  Description of Unknown: Cas13 sequence
NRRDMEASPGRLARYIVLKTLYERAFPRWLEAREAETLNGWIGRAADRATVAARHINKDENAAARMAGLVRLADGKGIADFTDRLAAETASEYRVQRGYDSDPAVARKQAKHIEDLRCDVVGQAFEAYLADVARKLAWTMNDPPGGPLPDEKKASLETAAPPAEDAGAEAEEDWLARLYFLLHMLPVEEVGGLRHQLRKWSVLEREPDSVLEREPDADVEAIERILGLYLDMHDAKFEGGDGVAGAEALTDLFTSPAQFRRVCPEDGAGNGGHVPWRGLREMLRFGGGEPRLMWAFRKWPIGDGMVDGLNALEATVAEAHKQREDLHAKWAGKKGFSRKDKDEYRAALETVVVHRHLAAHVQLVNHARLHRLAMAVLARLADYAGLWERDLYFTTLALIRLENGKPEDVFRSRELEWLREGRIVDALKELKKNADGSEPAVGTALQRLFGKGILTGGGTVSVRRDLLHFNMLQRKANEPFNLTTAVNDTRKLMAYDRKLKNAVSRSIIELLAREGLDLAWEMKDHQLAGAVLKTRQAVHLGGAKVGGGPITEDLHGPEFTAMAAALFGGEARAATDAAEAATGRPDRRERKSGGASPRPARPAKTLPAPTPRLLPAAGERVEGVLVEEKTRKGGWKAAVEIGGPRIVGDIFNSGEVPSDAEPGLEAEFVVRVANPANASFMWLSPDVEERLKKAAAPRRGGRPAGRQR

SEQ ID NO: 186 - protein, 1003 aa, Unknown; identical to SEQ ID NO: 182
  Description of Unknown: Cas13 sequence

SEQ ID NO: 187 - protein, 985 aa, Unknown; identical to SEQ ID NO: 183
  Description of Unknown: Cas13 sequence

SEQ ID NO: 188 - protein, 1003 aa, Unknown; identical to SEQ ID NO: 182
  Description of Unknown: Cas13 sequence

SEQ ID NO: 189 - protein, 985 aa, Unknown; identical to SEQ ID NO: 183
  Description of Unknown: Cas13 sequence

SEQ ID NO: 190 - protein, 1000 aa, Unknown
  Description of Unknown: Cas13 sequence
MEEANRYIYGAYFNMARDNFLNTIKLLADKMKLGATSGFGKDGNEVNDINELFGDKNTYANIENVVEFYFPWIKALEGRFSLDKGDRNLNDMKMFYKSVLTAFFTAVDSLRNKYTHYSHKDLNIREIKIECTLGGKDYCIGLLNALDCIYDSAVNLLKLRFMAGEYEVAHLRRCKAVNKKVVVRTEKDGFYYRLSDNGGVTEKGVIFIASMFLNRKYGFLFLKQLEGFKRSDEKRYRLTLETFLAFSNIKPVDRLKSDKLDRASLGLDMLNELTKIPRELSETLSVDCLYKYLTSDGEDDLRSRIRYQDRFVPLALEFISQSDEFKDFRFYTYVGNYVYKGYIKRLIDGTDKERYLSDRLCGFYKSVNDASSDAIAQKYGVEIKDSNEPDYMLPDSFRPHVLRATPHFVINNNNIGIKICGNDCLPIVNGKGVESPEPDYWLSIYELPAMLFYAYLREKNGKLLKDYKSIRELIEDVEKKADEKNDRDKGALMARHIDKEIIWTQTKLDEVKRLEEKKVAAYGKKGRVVLKSGRMADLLAHDMVRLQPATKGSDKITGANFQALQVSLAYFKRDILADVFSRAMLTTGNHRHPFLYRIDVSHCSSLRDFYVAYLGERRKYFEDVAKKIAKNKLNTPCHILRRLQREGSGEEAGKDVKPKFLPRGIFTGSIKSCLEKSALNINIRNARNDVKPAINAAYLILMYYKEIEKGEFQGFYGEKRRYDILEEGKPLDLDERKKALASIKPAKIDVSEANMPMSKEEHLMRKRYHAVCNNESAIRMYQVQDILLLLMAKDIFKKALSEGVMSKKIGLENLNGIFDAPVNFVKNFDNIKLTATGIKIKDYGKVCRLGTDFKFNSLVKAFHKVYSKSVEMDYSDYLKEEEEFEKYRLNMVKLCREVERGITEDLHLSLDGKSHLGFNDDVIKPYNDKYNVFNGGDLTFFINARNMFMHGDYKYECVKYVVSEHFKGSLNDVSFAKETYGHFCNLLESMRKKTGLRIDI

SEQ ID NO: 191 - protein, 1003 aa, Unknown; identical to SEQ ID NO: 179
  Description of Unknown: Cas13 sequence

SEQ ID NO: 192 - protein, 1003 aa, Unknown; identical to SEQ ID NO: 182
  Description of Unknown: Cas13 sequence

SEQ ID NO: 193 - protein, 1003 aa, Unknown
  Description of Unknown: Cas13 sequence
MGAIENKHIFAAYANLAIDGLIKTLNFIAKKLDTQKQLSSWDIKHVITLIDSIFDQNPQNNLEQVVEGYLPWIKPIIEMKTPKKGERQSDKLCIEYKTIITAFASLLNDVRNYYTHYYHDPICIYPGGYDIPSSLNCIYDSAINIIKERFQAEEKEIEHLRRYTRKKGRVVLKTEDDHFYYTLVNNNDLSEKGYAFFISMFLERKYSYLFLKKLSGFKRGDSLQYRLTLEVFTALSTKPPVERLRTTKDTKQDRALDILNELSRIPIELYQTLEPKYREMYNETLQPTDAEDPYGLPDRSRIRFRSRFEAFALHFLDKQADFKEIGFYTYLGNYFHNGYQKTRVDRETKDRYINFQLAGFCKNIQDISAKKLSEALNVKSIDISTDSIPDINSFEPYLVQSTPHYIVNGNNIGIKVLPEGKDTYPTIDEKGAKMPIADFWLSKYELPAMLFYTYLRNNNIHKSHCPLSVKDIIERSIHKSTKQKHPEERSELMLRRVMKAIFWTDSKLNEVERIKSQKSAFGKRQHEILKAGRIAETLVRDMLWLQPSKNNGRDKVTEPNFQAIQVSLAYFGIRRNDLTEIFTRAGLINSSNPHPFLAQIGTNYTSLIEFYIAYLKERKVYFSRIQKKILQGKLNIQCHPLRDLQREPNKPQDKEEAIFLPRGLFNEAIINCLKKSKLKQLIESPTREKSPALNVSYLIQNYFRTYFEDQSQEFYAQPRNYRLFDKLSPNKGKSKSYLSLEQRIKKMEELRPSKIPVAEANKLLEKEDRLYRKNYNEICDNESIIRLYQIQDILLFMMTKEYLPSDLYNRINKYKLENVKGILNERVSYLIDLNPLKIQGEDIKIKDYGKLFYIHHDTRISSLNKVLSKVKRNNSISSSVKIQPYENYKRECLDFEEAQIQIIPIIHSFEIAMVSMFPDLKKATPGNYYDFNELITEYEKRTKQKIDSSFLIKTRNMFLHDKYEAECIKEISDDFVYAKKIIAEFKMKIENIKLEDLSNDSSA

SEQ ID NO: 194 - protein, 1003 aa, Unknown; identical to SEQ ID NO: 182
  Description of Unknown: Cas13 sequence

SEQ ID NO: 195 - protein, 1003 aa, Unknown
  Description of Unknown: Cas13 sequence
MGAIENKHIFAAYANLAIDGLIKTLNFIAKKLDTQKQLSSWDIKHVITLIDSIFDQNPQNNLEQVVEGYLPWIKPIIEMKTPKKGERQSDKLCIEYKTIITAFASLLNDVRNYYTHYYHDPICIYPGGYDIPSSLNCIYDSAINIIKERFQAEEKEMEHLRRYTRKKGRVVLKTEDDHFYYTLANNNDLSEKGYAFFISMFLERKYSYLFLKKLSGFKRGDSLQYRLTLEVFTALSTKPPVERLRTTKDTKQDRALDILNELSKIPIELYQTLEPKYREMYNETLQPTDAEDPYGLPDRSRIRFRSRFETFALHFLDKQPDFKEIGFYTYLGNYFHNGYQKTRVDRETKDRYINFQLAGFCKNIQDISAKKLSEALNVKSIDISTDSIPDINSFEPYLVQSMPHYIVNGNNIGIKVLPEGKDTYPTIDEKGAKMPIADFWLSKYELPAMLFYTYLRNNNIHKSHCPLSVKDIIERSIHKSTKQKHPEERSELMLRRVMKAIFWTDSKLNEVERIKSQKSAFGKRQHEILKAGRIAEMLVRDMLWLQPSKNNGRDKVTEPNFQAIQVSLAYFGIRRNDLTEIFTRAGLINSSNPHPFLAQIGTNYTSLIEFYIAYLKERKVYFSRIQKKILQGKLNIQCHPLRDLQREPNKPQEKEEAIFLPRGLFNEAIINCLKKSKLKQLIESPTREKSPALNVSYLIQNYFRAYFEDQSQEFYAQPRNYRLFDKLSPNKGKSKSYLSLEQRIKKMEELRPSKIPVAEANKLLEKEDRLYRKNYNEICDNESIIRLYQIQDILLFMMTKEYLPSDLYNRINKYKLENVKGILNERVSYLIDLNPLKIQGEDIKIKDYGKLFYIHHDTRISSLNKVLSKVKRNNSISSSVKIQPYENYKRECLDFEEAQIQIIPIIHSFEIAMVSMFPDLKKATPGNYYDFNELITEYEKRTKQKIDSSFLIKTRNMFLHDKYEAECIKEISDDFVYAKKIIAEFKMKIENIKLEDLSNDSSA

SEQ ID NO: 196 - protein, 985 aa, Unknown; identical to SEQ ID NO: 183
  Description of Unknown: Cas13 sequence

SEQ ID NO: 197 - protein, 1003 aa, Unknown; identical to SEQ ID NO: 193
  Description of Unknown: Cas13 sequence

SEQ ID NO: 198 - protein, 1003 aa, Unknown
  Description of Unknown: Cas13 sequence
MGAIENKHIFAAYANLAIDGLIKTLNFIAKKLDTQKQLSSWDIKHVITLIDSIFDQNPQNNLEQVVEGYLPWIKPIIEMKTPKKGERQSDKLCIEYKTIITAFASLLNDVRNYYTHYYHDPICIYPGGYDIPSSLNCIYDSAINIIKERFQAEEKEMEHLRRYTRKKGRVVLKTEDDHFYYTLANNNDLSEKGYAFFISMFLERKYSYLFLKKLSGFKRGDSLQYRLTLEVFTALSTKPPVERLRTTKDTKQDRALDILNELSRIPIELYQTLEPKYREMYNETLQPTDAEDPYGLPDRSRIRFRSRFEAFALHFLDKQADFKEIGFYTYLGNYFHNGYQKTRVDRETKDRYINFQLAGFCKNIQDISAKKLSEALNVKSIDISTDSIPDINSFEPYLVQSTPHYIVNGNNIGIKVLPEGKDTYPTIDEKGAKMPIADFWLSKYELPAMLFYTYLRNNNIHKSHCPLSVKDIIERSIHKSTKQKHPEERSELMLRRVMKAIFWTDSKLNEVERIKSQKSAFGKRQHEILKAGRIAETLVRDMLWLQPSKNNGRDKVTEPNFQAIQVSLAYFGIRRNDLTEIFTRAGLINSSNPHPFLAQIGTNYTSLIEFYIAYLKERKVYFSRIQKKILQGKLNIQCHPLRDLQREPNKPQEKEEAIFLPRGLFNEAIINCLKKSKLKQLIESPTREKSPALNVSYLILNYFRTYFEDQSQEFYAQPRNYRLFDKLSPNKGKSKSYLSLEQRIKKMEELRPSKIPVAEANKLLEKEDRLYRKNYNEICDNESIIRLYQIQDILLFMMTKEYLPSDLYNRINKYKLENVKGILNERVSYLIDLNPLKIQGEDIKIKDYGKLFYIHHDTRINSLNKVLSKVKRNNSISSSVKIQPYENYKRECLDFEEAQIQIIPIIHSFEIAMVSMFPDLKKATPGNYYDFNELITEYEKRTKQKIDSSFLIKTRNMFLHDKYEAECIKEISDDFVYAKKIIAEFKMKIENIKLEDFSNDSSA

SEQ ID NO: 199 - protein, 1003 aa, Unknown
  Description of Unknown: Cas13 sequence
MGAIENKHIFAAYANLAIDGLIKTLNFIAKKLDTQKQLSSWDIKHVITLIDSIFDQNPQNNLEQVVEGYLPWIKPIIEMKTPKKGERQSDKLCIEYKTIITAFASLLNDVRNYYTHYYHDPICIYPGGYDIPSSLNCIYDSAINIIKERFQAEEKEMEHLRRYTRKKGRVVLKTEDDHFYYTLANNNDLSEKGYAFFISMFLERKYSYLFLKKLSGFKRGDSLQYRLTLEVFTALSTKPPVERLRTTKDTKQDRALDILNELSKIPIELYQTLEPKYREMYNETLQPTDAEDPYGLPDRSRIRFRSRFEAFALHFLDKQADFKEIGFYTYLGNYFHNGYQKTRVDRETKDRYINFQLAGFCKNIQDISAKKLSEALNVKSIDISTDSIPDINSFEPYLVQSTPHYIVNGNNIGIKVLPEGKDTYPTIDEKGAKMPIADFWLSKYELPAMLFYTYLRNNNIHKSHCPLSVKDIIERSIHKSTKQKHPEERSELMLRRVMKAIFWTDSKLNEVERIKSQKSAFGKRQHEILKAGRIAETLVRDMLWLQPSKNNGRDKVTEPNFQAIQVSLAYFGIRRNDLTEIFTRAGLINSSNPHPFLAQIGTNYTSLIEFYIAYLKERKVYFSRIQKKILQGKLNIQCHPLRDLQREPNKPQEKEEAIFLPRGLFNEAIINCLKKSKLKHLIESPTREKSPALNVSYLIQNYFRAYFEDQSQEFYAQPRNYRLFDKLSPNKGKSKSYLSLEQRIKKMEELRPSKIPVAEANKLLEKEDRLYRKNYNEICDNESIIRLYQIQDILLFMMTKEYLPSDLYNRINKYKLENVKGILNERVSYLIDLNPLKIQGEDIKIKDYGKLFYIHHDTRISSLNKVLSKVKRNNSISSSVKIQPYENYKRECLDFEEAQIQIIPIIHSFEIAMVSMFPDLKKATPGNYYDFNELITEYEKRTKQKIDSSFLIKTRNMFLHDKYEAECIKEISDDFVYAKKIIAEFKMKIENIKLEDLSNDSSA

SEQ ID NO: 200 - protein, 1003 aa, Unknown
  Description of Unknown: Cas13 sequence
MGAIENKHIFAAYANLAIDGLIKTLNFIAKKLDTQKQLSSWDIKHVITLIDSIFDQNPQNNLEQVVEGYLPWIKPIIEMKTPKKGERQSDKLCIEYKTIITAFASLLNDVRNYYTHYYHDPICIYPGGYDIPSSLNCIYDSAINIIKERFQAEEKEMEHLRRYTRKKGRVVLKTEDDHFYYTLANNNDLSKKGYAFFISMFLERKYSYLFLKKLSGFKRGDSLQYRLTLEVFTALSTKPPVERLRTTKDTKQDRALDILNELSRIPIELYQTLEPKYREMYNETLQPTDAEDPYGLPDRSRIRFRSRFEAFALHFLDKQADFKEIGFYTYLGNYFHNGYQKTRVDRETKDRYINFQLAGFCKNIQDISAKKLSEALNVKSIDISTDSIPDINSFEPYLVQSTPHYIVNGNNIGIKVLPEGKDTYPTIDEKGAKMPIADFWLSKYELPAMLFYTYLRNNNIHKSHCPLSVKDIIERSIHKSTKQKHPEERSELMLRRVMKAIFWTDSKLNEVERIKSQKSAFGKRQHEILKAGRIAETLVRDMLWLQPSKNNGRDKVTEPNFQAIQVSLAYFGIRRNDLTEIFTRAGLINSSNPHPFLAQIGTNYTSLIEFYIAYLKERKVYFSRIQKKILQGKLNIQCHPLRDLQREPNKPQEKEEAIFLPRGLFNEAIINCLKKSKLKQLIESPTREKSPALNVSYLILNYFRTYFEDQSQEFYAQPRNYRLFDKLSPNKGKSKSYLSLEQRIKKMEELRPSKIPVAEANKLLEKEDRLYRKNYNEICDNESIIRLYQIQDILLFMMTKEYLPSDLYNRINKYKLENVKGILNERVSYLIDLNPLKIQGEDIKIKDYGKLFYIHHDTRINSLNKVLSKVKRNNSISSSVKIQPYENYKRECLDFEEAQIQIIPIIHSFEIAMVSMFPDLKKATPGNYYDFNELITEYEKRTKQKIDSSFLIKTRNMFLHDKYEAECIKEISDDFVYAKKIIAEFKMKIENIKLEDFSNDSSA

SEQ ID NO: 201 - protein, 1150 aa, Unknown
  Description of Unknown: Cas13 sequence
MKHVFAAYFSDARLNIMASLNDVREKSGLKRYKNEAENVQNFEGIFPKNIASDIRDKRITLLRIRFPFIETIVDPGRGKENPASKYGELSWLFQLVNDMRNVFIHSTGSEEEIDYQHHKKIFNALRKVYDCGLRTVKSRFQLENDTTMPLLRCDNRGRPKPFNKFSLALCTSPERNGNKKQSDVLHDFGRVLLCSLFLEKRQISGLVSHFWDKNGYGTDWNDSEQTIIRELLYVNRIRLPSQRLRTDSTLTSVTLDTISELARCPRPLFELLDADGQENFRVGRSPKNPQNRNDDPSYLLLRGHQSRFIPLAMRHLDFDSKCKLRFAVDLGQYYHSVRLKPAESFIDGNPGIRRLGQKIIAFGRLKDFEDAEKPEIWKKLEENGQKFAEEEEELLKRASITGSPEELKPYIIKTFPHYHLYRDKIGFCIDWEEKKDQKVKYPNLGVRGEDSKSTDSGGIKKRENRQLSRHQFWISPNKIIDLAFYHYLQTEIKQEITASVKTGRKKCPYPSVENILKEYYEGMVVLIKELKEQGPLPPWTEIPQISERRAECHRWINKEIIKAENFTISLADLPKAIRRHLKVLDSRETSVSDIIKRTKTMIEETCKKQKEIEYLLKYPKKRGKKGFRPIKHGNIADFLTEDLLRFQPKDSSKKNGGKLTSKNYQILQKAIAYYDKPYCIVDLLKKSGLLEGEFKHPFLCKIITEENHEQYSTLIDFYQKYLEERKAFLEGFIDTFVAGSSIPGWLRLRKPSTFESWLDQQLDEDEKLCQPLPVPKSLFYQMLLKMTAEKLDLTPEMLCKKGTQRFIRDSQEVEVKPSVSWFIRQYMEHRDDTAQEMYMFKRRHELFDFFHDKKKTTKKLHEEKTCCLSEKVRQEELESVHKGIEKLKKLLRTYKRSEKKIRHFSTMDMVLYLLAKKNFEKLILCDETSGPDWSLKTLETKILSTKIKYELNVPGTDRTIVHRACAIKKTGELRLLVRDRRLPSLLDYYPKTEKSIDQEEIKVELADYSCKRIEAMKLISDLEQKIEESCNRGFCKPVPDKLKKIFGAKKHGTLLYALYHRFHEEKDKSVDEQGFNKDCFAHARQIRNAFAHNEYPVSEQFNQIVRQVNETSQPHNHNSPVNHPKIADQLVKELDKLYKPWRNFLKRIAG

SEQ ID NO: 202 - protein, 985 aa, Unknown; identical to SEQ ID NO: 183
  Description of Unknown: Cas13 sequence

SEQ ID NO: 203 - protein, 985 aa, Unknown; identical to SEQ ID NO: 183
  Description of Unknown: Cas13 sequence

SEQ ID NO: 204 - protein, 1003 aa, Unknown; identical to SEQ ID NO: 182
  Description of Unknown: Cas13 sequence

SEQ ID NO: 205 - protein, 985 aa, Unknown; identical to SEQ ID NO: 183
  Description of Unknown: Cas13 sequence

SEQ ID NO: 206 - protein, 1003 aa, Unknown; identical to SEQ ID NO: 179
  Description of Unknown: Cas13 sequence

SEQ ID NO: 207 - protein, 1003 aa, Unknown; identical to SEQ ID NO: 200
  Description of Unknown: Cas13 sequence

SEQ ID NO: 208 - protein, 985 aa, Unknown
  Description of Unknown: Cas13 sequence
MGAIENKHIFAAYANLAIDGLIKTLNFIAKKLDTQKQLSSWDIKHVITLIDSIFDQNPQNNLEQVVEGYLPWIKPIIEMKTPKKGERQSDKLCIEYKTIITAFASLLNDVRNYYTHYYHDPICIYPGGYDIPSSLNCIYDSAINIIKERFQAEEKEMKHLRNYTLVNNNGLSEKGYAFFISKFLERKYSYLFLKKLSGFKRGDSLQYRLTLEVFTALSTKPPVERLRTTKDTKQDRALDILNELSKIPIELYQTLEPKYREMYNETLQPTDAEDPYGLPDRSRIRFRSRFEAFALHFLDKQADFKEIGFYTYLGNYFHNGYQKTRVDRETKDRYINFQLAGFCKNIQDISAKKLSEALNVKSIDISTDSIPDINSFEPYLVQSTPHYIVNGNNIGIKVLPEGKDTYPTIDEKGAKMPIADFWLSKYELPAMLFYTYLRNNNIHKSHCPLSVKDIIERSIHKSTKQKHPEERSELMLRRVMKAIFWTDSKLNEVERIKSQKSAFGKRQHEILKAGRIAETLVRDMLWLQPSKNNGRDKVTEPNFQAIQVSLAYFGIRRNDLTEIFTRAGLINSSNPHPFLAQIGTNYTSLIEFYIAYLKERKVYFSRIQKKILQGKLNIQCHPLRDLQREPNKPQEKEEAIFLPRGLFNEAIINCLKKSKLKQLIESPTREKSPALNVSYLIQNYFRTYFEDQSQEFYAQPRNYRLFDKLSPNKGKSKSYLSLEQRIKKMEELRPSKIPVAEANKLLEKEDRLYRKNYNEICDNESIIRLYQIQDILLFMMTKEYLPSDLYNRINKYKLENVKGILNERVSYLIDLNPLKIQGEDIKIKDYGKLFYIHHDTRINSLNKVLSKVKRNNSISSSVKIQPYENYKRECLDFEEAQIQIIPIIHSFEIAMVSMFPDLKKATPGNYYDFNELITEYEKRTKQKIDSSFLIKTRNMFLHDKYEAECIKEISDDLVYAKKIIAEFKMKIENIKLEDLSNDSSA

SEQ ID NO: 209 - protein, 1003 aa, Unknown; identical to SEQ ID NO: 179
  Description of Unknown: Cas13 sequence

SEQ ID NO: 210 - protein, 1003 aa, Unknown; identical to SEQ ID NO: 198
  Description of Unknown: Cas13 sequence

SEQ ID NO: 211 - protein, 1003 aa, Unknown; identical to SEQ ID NO: 182
  Description of Unknown: Cas13 sequence

SEQ ID NO: 212 - protein, 985 aa, Unknown; identical to SEQ ID NO: 183
  Description of Unknown: Cas13 sequence

SEQ ID NO: 213 - protein, 1003 aa, Unknown
  Description of Unknown: Cas13 sequence
MGAIENKHIFAAYANLAIDGLIKTLNFIAKKLDTQKQLSSWDIKHVITLIDSIFDQNPQNNLEQVVEGYLPWIKPIIEMKTPKKGERQSDKLCIEYKTIITAFASLLNDVRNYYTHYYHDPICIYPGGYDIPSSLNCIYDSAINIIKERFQAEEKEMEHLRRYTRKKGRVVLKTEDDHFYYTLANNNDLSEKGYAFFISMFLERKYSYLFLKKLSGFKRGDSLQYRLTLEVFTALSTKPPVERLRTTKDTKQDRALDILNELSRIPIELYQTLEPKYREMYNATLQPTDAEDPYGLPDRSRIRFRSRFEAFALHFLDKQADFKEIGFYTYLGNYFHNGYQKTRVDRETKDRYINFQLAGFCKNIQDISAKKLSEALNVKSIDISTDSIPDINSFEPYLVQSTPHYIVNGNNIGIKVLPEGKDTYPTIDEKGAKMPIADFWLSKYELPAMLFYTYLRNNNIHKSHCPLSVKDIIERSIHKSTKQKHPEERSELMLRRVMKAIFWTDSKLNEVERIKSQKSAFGKRQHEILKAGRIAETLVRDMLWLQPSKNNGRDKVTEPNFQAIQVSLAYFGIRRNDLTEIFTRAGLINSSNPHPFLAQIGTNYTSLIEFYIAYLKERKVYFSRIQKKILQGKLNIQCHPLRDLQREPNKPQEKEEAIFLPRGLFNEAIINCLKKSKLKQLIESPTREKSPALNVSYLILNYFRTYFEDQSQEFYAQPRNYRLFDKLSPNKGKSKSYLSLEQRIKKMEELRPSKIPVAEANKLLEKEDRLYRKNYNEICDNESIIRLYQIQDILLFMMTKEYLPSDLYNRINKYKLENVKGILNERVSYLIDLNPLKIQGEDIKIKDYGKLFYIHHDTRINSLNKVLSKVKRNNSISSSVKIQPYENYKRECLDFEEAQIQIIPIIHSFEIAMVSMFPDLKKATPGNYYDFNELITEYEKRTKQKIDSSFLIKTRNMFLHDKYEAECIKEISDDFVYAKKIIAEFKMKIENIKLEDFSNDSSA

SEQ ID NO: 214 - protein, 1003 aa, Unknown; identical to SEQ ID NO: 195
  Description of Unknown: Cas13 sequence

SEQ ID NO: 215 - protein, 1003 aa, Unknown; identical to SEQ ID NO: 179
  Description of Unknown: Cas13 sequence

SEQ ID NO: 216 - protein, 1359 aa, Unknown
  Description of Unknown: Cas13 sequence
MGKLYGYKRWYEIEQNNGEKGSFKRKIRVKRVYDEESKSYVVRRDEVEDTELIKNKNFIINLKDYKTRNSNIQKFYDKFHVGNILFKLKASVKKGKKTFYKDLEKAETVLTNVEILEQTIKLANNSKINRKKLEKELTQLNINEKSEEVTIDNIKIYLRQGEKFDKKENINAIKWRKLTSEELTIKVEIYRECQSINSNLYSLLDYVLSNEEYDDRYYLEEVENKLLIFGTGNKNKNGRNYYYFDYVLKSLSKIKGLIKKDDRNLNYLMFLFNIQKTSENKEHFINKIFNYFKYEVRIEKEDIVEFLVGELEYYDLIKRIEKKPSENQNQTNLEKTYILLDKHEKLKETIDTKNEIVQKLTIELKNNNLRNRIEIILHKYKILELVDKLNKNIKNGKINTELYGIYKEHYGQCIEYINFNELALEEKELYKIIYRYLKGRIEKLLQNRNKIKIGELRIEDIFIFQKLLEKIEIRVKQYLLEHILYLGKLKHHNIDEVNTIRFVEEHANEELSLELITLFSATNVELNRLLKVKGENGSYEKDYDFFSAKPDKGKIKIKDTNSVMKFELLKKLKFINSEATETNQEAIDFLKEAYNLRNNILHGKNEEIIEDNKKNLSKSYKNINELIEELRPSDNEICKSLNLDIIFKGNRKINDINAKLFGNNREKIYLPSFSKLVPEIKNIIESYDKNGTFNDERIKKIVLNGAIYVNKILYLKECSNKDGEFIKNLKEELNKDSKEKSKYVSIEELYKKSQISASKGNKKAIYKYQRKIIEIYLKYLKENYVEILDFSKLNLNIEQIENDIKNRKNSENKVLIESIKQKVFPENDFEYIISIFALLNDNIFINKIRNRFFSTDTWLKNNRYSNIIKILDEVISVNLLRTELLNTSIDIEEIKDDVLTEDIENIIPEIREEILQRTKKDFKTLLGNNAISKEGLSNEDIDKIRNIEDAKINLDFVNNEIKVSLKEYGSLPPNGVLSRNTSKYYNNEIAKKIDQISILTFTKKSIGTISDEKFRNIYWQERKESDESKKIFVYNKNILYLVTKHSFEKLYKNFLEEELNNLKLEDTKYLRDLDLRREKNLKVDNTLKEINEKVRGYSKEYKKKFIENLKNNDEYFGKVVSGRFKNYQEFKEIYDEVSEYKKIRDVVNFNPLNKVYNYLIEINWKLAIQMARAERDLHYIVNGLNELKLIELNQGQNDGISRAYPKYKLNKEKNKKELRLEECHYNFDIDNYKKFEKICEKLGIDLSENGELQQENETNIRNYISHFYILRKPFVDISISEAIKRVSKLLSYRTRYNNSTYSSVFEVFKKDVELNYDFLKKKIELNGKTYDEVVQRKKISCLELESYLDYKPIIKKILF

SEQ ID NO: 217 - protein, 1003 aa, Unknown; identical to SEQ ID NO: 182
  Description of Unknown: Cas13 sequence

SEQ ID NO: 218 - protein, 1003 aa, Unknown; identical to SEQ ID NO: 179
  Description of Unknown: Cas13 sequence

SEQ ID NO: 219 - protein, 1003 aa, Unknown; identical to SEQ ID NO: 179
  Description of Unknown: Cas13 sequence

SEQ ID NO: 220 - protein, 1359 aa, Unknown; identical to SEQ ID NO: 216
  Description of Unknown: Cas13 sequence

SEQ ID NO: 221 - protein, 1003 aa, Unknown
  Description of Unknown: Cas13 sequence
MGAIENKHIFAAYANLAIDGLIKTLNFIAKKLDTQKQLSSWDIKHVITLIDSIFDQNPQNNLEQVVEGYLPWIKPIIEMKTPKKGERQSDKLCIEYKTIITAFASLLNDVRNYYTHYYHDPICIYPGGYDIPSSLNCIYDSAINIIKERFQAEEKEIEHLRRYTRKKGRVVLKTEDDHFYYTLVNNNDLSEKGYAFFISMFLERKYSYLFLKKLSGFKRGDSLQYRLTLEVFTALSTKPPVERLRTTKDTKQDRALDILNELSRIPIELYQTLEPKYREMYNETLQPTDAEDPYGLPDRSRIRFRSRFEAFALHFLDKQADFKEIGFYTYLGNYFHNGYQKTRVDRETKDRYINFQLAGFCKNIQDISAKKLSEALNVKSIDISTDSIPDINSFEPYLVQSTPHYIVNGNNIGIKVLPEGKDTYPTIDEKGAKMPIADFWLSKYELPAMLFYTYLRNNNIHKSHCPLSVKDIIERSIHKSTKQKHPEERSELMLRRVMKAIFWTDSKLNEVERIKSQKSAFGKRQHEILKAGRIAETLVRDMLWLQPSKNNGRDKVTEPNFQAIQVSLAYFGIRRNDLTEIFTRAGLINSSNPHPFLAQIGTNYTSLIEFYIAYLKERKVYFSRIQKKILQGKLNIQCHPLRDLQREPNKPQDKEEAIFLPRGLFNEAIINCLKKSKLKQLIESPTREKSPALNVSYLIQNYFRTYFEDQSQEFYAQPRNYRLFDKLSPNKGKSKSYLSLEQRIKKMEELRPSKIPVAEANKLLEKEDRLYRKNYNEICDNESIIRLYQIQDILLFMMTKEYLPSDLYNRINKYKLENVKGILNERVSYLIDLNPLKIQGEDIKIKDYGKLFYIHHDTRISSLNKVLSKVKRNNSISSSVKIQPYENYKRECLDFEEAQIQIIPIIHSFEIAMVSMFPDLKKATPGNYYDFNELITEYEKRTKQKIDSSFRIKTRNMFLHDKYEAECIKEISDDFVYAKKIIAEFKMKIENIKLEDLSNDSSA

SEQ ID NO: 222 - protein, 1003 aa, Unknown; identical to SEQ ID NO: 182
  Description of Unknown: Cas13 sequence

SEQ ID NO: 223 - protein, 1003 aa, Unknown
  Description of Unknown: Cas13 sequence
MGAIENKHIFAAYANLAIDGLIKTLNFIAKKLDTQKQLSSWDIKHVITLIDSIFDQNPQNNLEQVVEGYLPWIKPIIEMKTPKKGERQSDKLCIEYKTIITAFASLLNDVRNYYTHYYHDPICIYPGGYDIPSSLNCIYDSAINIIKERFQAEEKEMEHLRRYIRKKGRVVLKTEDDHFYYTLANNNDLSEKGYAFFISMFLERKYSYLFLKKLSGFKRGDSLQYRLTLEVFTALSTKPPVERLRTTKDTKQDRALDILNELSRIPIELYQTLEPKYREMYNETLQPTDAEDPYGLPDRSRIRFRSRFEAFALHFLDKQADFKEIGFYTYLGNYFHNGYQKTRVDRETKDRYINFQLAGFCKNIQDISAKKLSEALNVKSIDISTDSIPDINSFEPYLVQSTPHYIVNGNNIGIKVLPEGKDTYPTIDEKGAKMPIADFWLSKYELPAMLFYTYLRNNNIHKSHCPLSVKDIIERSIHKSTKQKHPEERSELMLRRVMKAIFWTDSKLNEVERIKSQKSAFGKRQHEILKAGRIAETLVRDMLWLQPSKNNGRDKVTEPNFQAIQVSLAYFGIRRNDLTEIFTRAGLINSSNPHPFLAQIGTNYTSLIEFYIAYLKERKVYFSRIQKKILQGKLNIQCHPLRDLQREPNKPQEKEEAIFLPRGLFNEAIINCLKKSKLKQLIESPTREKSPVLNVSYLIQNYFRAYFEDQSQEFYAQPRNYRLFDKLSPNKGKSKSYLSLEQRIKKMEELRPSKIPVAEANKLLEKEDRLYRKNYNEICDNESIIRLYQIQDILLFMMTKEYLPSDLYNRINKYKLENVKGILNERVSYLIDLNPLKIQGEDIKIKDYGKLFYIHHDTRISSLNKVLSKVKRNNSISSSVKIQPYENYKRECLDFEEAQIQIIPIIHSFEIAMVSMFPDLKKATPGNYYDFNELITEYEKRTKQKIDSSFLIKTRNMFLHDKYEAECIKEISDDFVYAKKIIAEFKMKIENIKLEDFSNDSSA

SEQ ID NO: 224 - protein, 985 aa, Unknown; identical to SEQ ID NO: 208
  Description of Unknown: Cas13 sequence

SEQ ID NO: 225 - protein, 1003 aa, Unknown; identical to SEQ ID NO: 179
  Description of Unknown: Cas13 sequence

SEQ ID NO: 226 - protein, 1003 aa, Unknown; identical to SEQ ID NO: 198
  Description of Unknown: Cas13 sequence

SEQ ID NO: 227 - protein, 1003 aa, Unknown; identical to SEQ ID NO: 182
  Description of Unknown: Cas13 sequence

SEQ ID NO: 228 - protein, 1003 aa, Unknown; identical to SEQ ID NO: 182
  Description of Unknown: Cas13 sequence

SEQ ID NO: 229 - protein, 1095 aa, Unknown
  Description of Unknown: Cas13 sequence
MEKPLLPNVYTLKHKFFWGAFLNIARHNAFITICHINEQLGLKTPSNDDKIVDVVCETWNNILNNDHDLLKKSQLTELILKHFPFLTAMCYHPPKKEGKKKGHQKEQQKEKESEAQSQAEALNPSKLIEALEILVNQLHSLRNYYSHYKHKKPDAEKDIFKHLYKAFDASLRMVKEDYKAHFTVNLTRDFAHLNRKGKNKQDNPDFNRYRFEKDGFFTESGLLFFTNLFLDKRDAYWMLKKVSGFKASHKQREKMTTEVFCRSRILLPKLRLESRYDHNQMLLDMLSELSRCPKLLYEKLSEENKKHFQVEADGFLDEIEEEQNPFKDTLIRHQDRFPYFALRYLDLNESFKSIRFQVDLGTYHYCIYDKKIGDEQEKRHLTRTLLSFGRLQDFTEINRPQEWKALTKDLDYKETSNQPFISKTTPHYHITDNKIGFRLGTSKELYPSLEIKDGANRIAKYPYNSGFVAHAFISVHELLPLMFYQHLTGKSEDLLKETVRHIQRIYKDFEEERINTIEDLEKANQGRLPLGAFPKQMLGLLQNKQPDLSEKAKIKIEKLIAETKLLSHRLNTKLKSSPKLGKRREKLIKTGVLADWLVKDFMRFQPVAYDAQNQPIKSSKANSTEFWFIRRALALYGGEKNRLEGYFKQTNLIGNTNPHPFLNKFNWKACRNLVDFYQQYLEQREKFLEAIKNQPWEPYQYCLLLKIPKENRKNLVKGWEQGGISLPRGLFTEAIRETLSEDLMLSKPIRKEIKKHGRVGFISRAITLYFKEKYQDKHQSFYNLSYKLEAKAPLLKREEHYEYWQQNKPQSPTESQRLELHTSDRWKDYLLYKRWQHLEKKLRLYRNQDVMLWLMTLELTKNHFKELNLNYHQLKLENLAVNVQEADAKLNPLNQTLPMVLPVKVYPATAFGEVQYHKTPIRTVYIREEHTKALKMGNFKALVKDRRLNGLFSFIKEENDTQKHPISQLRLRRELEIYQSLRVDAFKETLSLEEKLLNKHTSLSSLENEFRALLEEWKKEYAASSMVTDEHIAFIASVRNAFCHNQYPFYKEALHAPIPLFTVAQPTTEEKDGLGIAEALLKVLREYCEIVKSQI

SEQ ID NO: 230 - protein, 1095 aa, Unknown; identical to SEQ ID NO: 229
  Description of Unknown: Cas13 sequence

SEQ ID NO: 231 - protein, 1008 aa, Unknown; identical to SEQ ID NO: 60
  Description of Unknown: Cas13 sequence

SEQ ID NO: 232 - protein, 1095 aa, Unknown; identical to SEQ ID NO: 229
  Description of Unknown: Cas13 sequence

SEQ ID NO: 233 - protein, 1224 aa, Unknown
  Description of Unknown: Cas13 sequence
MENKTSLGNNIYYNPFKPQDKSYFAGYFNAAMENTDSVFRELGKRLKGKEYTSENFFDAIFKENISLVEYERYVKLLSDYFPMARLLDKKEVPIKERKENFKKNFKGIIKAVRDLRNFYTHKEHGEVEITDEIFGVLDEMLKSTVLTVKKKKVKTDKTKEILKKSIEKQLDILCQKKLEYLRDTARKIEEKRRNQRERGEKELVAPFKYSDKRDDLIAAIYNDAFDVYIDKKKDSLKESSKAKYNTKSDPQQEEGDLKIPISKNGVVFLLSLFLTKQEIHAFKSKIAGFKATVIDEATVSEATVSHGKNSICFMATHEIFSHLAYKKLKRKVRTAEINYGEAENAEQLSVYAKETLMMQMLDELSKVPDVVYQNLSEDVQKTFIEDWNEYLKENNGDVGTMEEEQVIHPVIRKRYEDKFNYFAIRFLDEFAQFPTLRFQVHLGNYLHDSRPKENLISDRRIKEKITVFGRLSELEHKKALFIKNTETNEDREHYWEIFPNPNYDFPKENISVNDKDFPIAGSILDREKQPVAGKIGIKVKLLNQQYVSEVDKAVKAHQLKQRKASKPSIQNIIEEIVPINESNPKEAIVFGGQPTAYLSMNDIHSILYEFFDKWEKKKEKLEKKGEKELRKEIGKELEKKIVGKIQAQIQQIIDKDTNAKILKPYQDGNSTAIDKEKLIKDLKQEQNILQKLKDEQTVREKEYNDFIAYQDKNREINKVRDRNHKQYLKDNLKRKYPEAPARKEVLYYREKGKVAVWLANDIKRFMPTDFKNEWKGEQHSLLQKSLAYYEQCKEELKNLLPEKVFQHLPFKLGGYFQQKYLYQFYTCYLDKRLEYISGLVQQAENFKSENKVFKKVENECFKFLKKQNYTHKELDARVQSILGYPIFLERGFMDEKPTIIKGKTFKGNEALFADWFRYYKEYQNFQTFYDTENYPLVELEKKQADRKRKTKIYQQKKNDVFTLLMAKHIFKSVFKQDSIDQFSLEDLYQSREERLGNQERARQTGERNTNYIWNKTVDLKLCDGKITVENVKLKNVGDFIKYEYDQRVQAFLKYEENIEWQAFLIKESKEEENYPYVVEREIEQYEKVRREELLKEVHLIEEYILEKVKDKEILKKGDNQNFKYYILNGLLKQLKNEDVESYKVFNLNTEPEDVNINQLKQEATDLEQKAFVLTYIRNKFAHNQLPKKEFWDYCQEKYGKIEKEKTYAEYFAEVFKKEKEALIK

SEQ ID NO: 234 - protein, 1095 aa, Unknown; identical to SEQ ID NO: 229
  Description of Unknown: Cas13 sequence

SEQ ID NO: 235 - protein, 1174 aa, Unknown
  Description of Unknown: Cas13 sequence
MTEQSERPYNGTYYTLEDKHFWAAFLNLARHNAYITLTHIDRQLAYSKADITNDQDVLSFKALWKNLDNDLERKSRLRSLILKHFSFLEGAAYGKKLFESKSSGNKSSKNKELTKKEKEELQANALSLDNLKSILFDFLQKLKDFRNYYSHYRHSGSSELPLFDGNMLQRLYNVFDVSVQRVKRDHEHNDKVDPHYHFNHLVRKGKKDRYGHNDNPSFKHHFVDSEGMVTEAGLLFFVSLFLEKRDAIWMQKKIRGFKGGTGPYEQMTNEVFCRSRISLPKLKLESLRTDDWMLLDMLNELVRCPKPLYDRLREKDRACFRVPVDILPDEDDTDGGGEDPFKNTLVRHQDRFPYFALRYFDLKKVFTSLRFHIDLGTYHFAIYKKMIGEQPEDRHLTRNLYGFGRIQDFAEEHRPEEWKRLVRDLDYLETGDKPYISQTTPHYHIEKGKIGLRFVPEGQHLWPSPEVGTTRTGRSKCAQDKRLTAEAFLSVHELMPMMFYYFLLREKYSEEVSAEKVQGRIKRVIEDVYAIYDAFARDEINTLKELDTCLADKGIRRGHLPKQMITILSQERKDMKEKIRKKLQEMIADTDHRLDMLDRQTDRKIRIGRKNAGLPKSGVIADWLVRDMMRFQPVAKDASGKPLNNSKANSTEYRMLQRALALFGGEKERLTPYFRQMNLTGGNNPHPFLHETRWESHTNILSFYRSYLRARKAFLERIGRSDRVENCPFLLLKEPKTDRQTLVAGWKDEFHLPRGIFTEAVRDCLIEMGYDEVGSYREVGFMAKAVPLYFERACEDRVQPFYDSPFNVGNSLKPKKGRFLSKEDRAEEWERGMERFRDLEAWSHSAARRIKDAFAGIEYASPGNKKKIEQLLRDLSLWEAFESKLKVRADKINLAKLKKEILEAQEHPYHDFKSWQKFERELRLVKNQDIITWMMCRDLMEENKVEGLDTGTLYLKDIRPNVQEQGSLNVLNRVKPMRLPVVVYRADSRGHVHKEAPLATVYIEERNTKLLKQGNFKSFVKDRRLNGLFSFVDTGGLAMEQYPISKLRVEYELAKYQTARVCVFELTLRLEESLLSRYPHLPDESFREMLESWSDPLLAKWPELHGKVRLLIAVRNAFSHNQYPMYDEAVFSSIRKYDPSSPDAIEERMGLNIAHRLSEEVKQAKETVERIIQA

SEQ ID NO: 236 - protein, 1103 aa, Unknown
  Description of Unknown: Cas13 sequence
MEKPLPPNVYTLKHKFFWGAFLNIARHNAFITICHINEQLGLTTPPNDDKIADVVCGTWNNILNNDHDLLKKSQLTELILKHFPFLAAMCYHPPKKEGKKKGSQKEQQKEKENEAQSQAEALNPSELIKALKTLVKQLRTLRNYYSHYKHKKPDAEKDIFKHLYKAFDASLRMVKEDYKAHFTVNLTQDFAHLNRKGKNKQDNPKFDRYRFEKDGFFTESGLLFFTNLFLDKRDAYWMLKKVSGFKASHKQSEKMTTEVFCRSRILLPKLRLESRYDHNQMLLDMLSELSRCPKLLYEKLSEKDKKHFQVEADGFLDEIEEEQNPFKDALIRHQDRFPYFALRYLDLNESFKSIRFQVDLGTYHYCIYDKKIGDEQEKRHLTRTLLSFGRLQDFTEINRPQEWKALTKDLDYKETSKQPFISKTTPHYHITDNKIGFRLGTSKELYPSLEVKDGANRIAKYPYNSDFVAHAFISVHELLPLMFYQHLTGKSEDLLKETVRHIQRIYKDFEEERINTIEDLEKANQGRLPLGAFPKQMLGLLQNKQPDLSEKAKIKIEKLIAETKLLSHRLNTKLKSSPKLGKRREKLIKTGDWLVKDFMRFQPVAYDVQNQPIESSKANSTEFQLIQRALALYGGEKNRLEGYFKQTNLIGNTNPHPFLNKFNWKACRNLVDFYQQYLEQREKFLEAIKNQPWEPYQYCLLLKIPKENRKNLVKGWEQGGISLPRGLFTEAIRETLSEDLTLSKPIRKEIKKHGRVGFISRAITLYFRERYQDDHQSFYNLPYELEAKASTPKPPLPKKREYVLRAEHYEYWQQNKPQSPTELQRLELHTSDRWKDYLLYKRWQHLEKKLRLYRNQDVMLWLMTLELTKNHFKELKLNYHQLKLENLAVNVQEADAKLNPLNQTLPMVLPVKVYPATAFGEVQYQETPIRTVYIREEQTKALKMGNFKALVKDRRLNGLFSFIKEENDTQKHPISQLRLRRELEIYQSLRVDAFKETLSLEEKLLNKHASLSSLENEFRTLLEEWKKKYAASSMVTDEHIAFIASVRNAFCHNQYPFYKETLHAPILLFTVAQPTTEEKDGLGIAEALLRVLREYCEIVKSQI

SEQ ID NO: 237 - protein, 1095 aa, Unknown; identical to SEQ ID NO: 229
  Description of Unknown: Cas13 sequence

SEQ ID NO: 238 - protein, 1224 aa, Unknown; identical to SEQ ID NO: 233
  Description of Unknown: Cas13 sequence

SEQ ID NO: 239 - protein, 948 aa, Unknown
  Description of Unknown: Cas13 sequence
MFFSFHNAQRVIFKHLYKAFDASLRMVKEDYKAHFTVNLTRDFAHLNRKGKNKQDNPDFNRYRFEKDGFFTESGLLFFTNLFLDKRDAYWMLKKVSGFKASHKQREKMTTEVFCRSRILLPKLRLESRYDHNQMLLDMLSELSRCPKLLYEKLSEENKKHFQVEADGFLDEIEEEQNPFKDTLIRHQDRFPYFALRYLDLNESFKSIRFQVDLGTYHYCIYDKKIGDEQEKRHLTRTLLSFGRLQDFTEINRPQEWKALTKDLDYKETSNQPFISKTTPHYHITDNKIGFRLGTSKELYPSLEIKDGANRIAKYPYNSGFVAHAFISVHELLPLMFYQHLTGKSEDLLKETVRHIQRIYKDFEEERINTIEDLEKANQGRLPLGAFPKQMLGLLQNKQPDLSEKAKIKIEKLIAETKLLSHRLNTKLKSSPKLGKRREKLIKTGVLADWLVKDFMRFQPVAYDAQNQPIKSSKANSTEFWFIRRALALYGGEKNRLEGYFKQTNLIGNTNPHPFLNKFNWKACRNLVDFYQQYLEQREKFLEAIKNQPWEPYQYCLLLKIPKENRKNLVKGWEQGGISLPRGLFTEAIRETLSEDLMLSKPIRKEIKKHGRVGFISRAITLYFKEKYQDKHQSFYNLSYKLEAKAPLLKREEHYEYWQQNKPQSPTESQRLELHTSDRWKDYLLYKRWQHLEKKLRLYRNQDVMLWLMTLELTKNHFKELNLNYHQLKLENLAVNVQEADAKLNPLNQTLPMVLPVKVYPATAFGEVQYHKTPIRTVYIREEHTKALKMGNFKALVKDRRLNGLFSFIKEENDTQKHPISQLRLRRELEIYQSLRVDAFKETLSLEEKLLNKHTSLSSLENEFRALLEEWKKEYAASSMVTDEHIAFIASVRNAFCHNQYPFYKEALHAPIPLFTVAQPTTEEKDGLGIAEALLKVLREYCEIVKSQI

SEQ ID NO: 240 - protein, 1095 aa, Unknown; identical to SEQ ID NO: 229
  Description of Unknown: Cas13 sequence

SEQ ID NO: 241 - protein, 1106 aa, Unknown
  Description of Unknown: Cas13 sequence
MEKPLPPNVYTLKHKFFWGAFLNIARHNAFITICHINEQLGLTTPPNDDKIADVVCGTWNNILNNDHDLLKKSQLTELILKHFPFLAAMCYHPPKKEGKKKGSQKEQQKEKENEAQSQAEALNPSELIKALKTLVKQLRTLRNYYSHYKHKKPDAEKDIFKHLYKAFDASLRMVKEDYKAHFTVNLTQDFAHLNRKGKNKQDNPKFDRYRFEKDGFFTESGLLFFTNLFLDKRDAYWMLKKVSGFKASHKQSEKMTTEVFCRSRILLPKLRLESRYDHNQMLLDMLSELSRCPKLLYEKLSEKDKKHFQVEADGFLDEIEEEQNPFKDALIRHQDRFPYFALRYLDLNESFKSIRFQVDLGTYHYCIYDKKIGDEQEKRHLTRTLLSFGRLQDFTEINRPQEWKALTKDLDYKETSKQPFISKTTPHYHITDNKIGFRLGTSKELYPSLEVKDGANRIAKYPYNSDFVAHAFISVHELLPLMFYQHLTGKSEDLLKETVRHIQRIYKDFEEERINTIEDLEKANQGRLPLGAFPKQMLGLLQNKQPDLSEKAKIKIEKLIAETKLLSHRLNTKLKSSPKLGKRREKLIKTGVLADWLVKDFMRFQPVAYDVQNQPIESSKANSTEFQLIQRALALYGGEKNRLEGYFKQTNLIGNTNPHPFLNKFNWKACRNLVDFYQQYLEQREKFLEAIKNQPWEPYQYCLLLKIPKENRKNLVKGWEQGGISLPRGLFTEAIRETLSEDLTLSKPIRKEIKKHGRVGFISRAITLYFRERYQDDHQSFYNLPYELEAKASTPKPPLPKKREYVLRAEHYEYWQQNKPQSPTELQRLELHTSDRWKDYLLYKRWQHLEKKLRLYRNQDVMLWLMTLELTKNHFKELKLNYHQLKLENLAVNVQEADAKLNPLNQTLPMVLPVKVYPATAFGEVQYQETPIRTVYIREEQTKALKMGNFKALVKDRRLNGLFSFIKEENDTQKHPISQLRLRRELEIYQSLRVDAFKETLSLEEKLLNKHASLSSLENEFRTLLEEWKKKYAASSMVTDEHIAFIASVRNAFCHNQYPFYKETLHAPILLFTVAQPTTEEKDGLGIAEALLRVLREYCEIVKSQI

SEQ ID NO: 242 - protein, 1095 aa, Unknown; identical to SEQ ID NO: 229
  Description of Unknown: Cas13 sequence

SEQ ID NO: 243 - protein, 1095 aa, Unknown; identical to SEQ ID NO: 229
  Description of Unknown: Cas13 sequence

SEQ ID NO: 244 - protein, 1095 aa, Unknown; identical to SEQ ID NO: 229
  Description of Unknown: Cas13 sequence

SEQ ID NO: 245 - protein, 948 aa, Unknown; identical to SEQ ID NO: 239
  Description of Unknown: Cas13 sequence

SEQ ID NO: 246 - protein, 1008 aa, Unknown; identical to SEQ ID NO: 60
  Description of Unknown: Cas13 sequence

SEQ ID NO: 247 - protein, 1175 aa, Unknown
  Description of Unknown: Cas13 sequence
MTEQNEKPYNGTYYTLEDKHFWAAFLNLARHNAYITLTHIDRQLAYSKADITNDEDILFFKGQWKNLDNDLERKARLRSLILKHFFFLEGAAYGKKLFESQSSGNKSSKKKELTKKEKEELQANALSLDNLKSILFDFLQKLKDFRNYYSHYRHPESSELPLFDGNMLQRLYNVFDVSVQRVKRDHEHNDKVDPHRHFNHLVRKGKKDKYGNNDNPFFKHHFVDREGKVTEAGLLFFVSLFLEKRDAIWMQKKIRGFKGGTETYQQMTNEVFCRSRISLPKLKLESLRTDDWMLLDMLNELVRCPKSLYDRLREEDRARFRVPVDILSDEDDTDGAEEDPFKNTLVRHQDRFPYFALRYFDLKKVFTSLRFHIDLGTYHFAIYKKNIGEQPEDRHLTRNLYGFGRIQDFAEEHRPEEWKRLVRDLDYFETGDKPYITQTTPHYHIEKGKIGLRFVPEGQHLWPSPEVGATRTGRSKYAQDKRFTAEAFLSVHELMPMMFYYFLLREKYSEEASAERVQGRIKRVIEDVYAVYDAFARDEINTRDELDACLADKGIRRGHLPRQMIAILSQKHKDMEEKVRKKLQEMIADTDHRLDMLDRQTDRKIRIGRKNAGLPKSGVIADWLVRDMMRFQPVAKDTSGKPLNNSKANSTEYRMLQRALALFGGEKERLTPYFRQMNLTGGNNPHPFLHETRWESHTNILSFYRSYLKARKAFLQSIGRSDRVENHRFLLLKEPKTDRQTLVAGWKGEFHLPRGIFTEAVRDCLIEMGLDEVRSYKEVGFMAKAVPLYFERASKDRVQPFYDYPFNVGNSLKPKKGRFLSKEKRAEEWESGKERFRDLEAWSHSAARRIEDAFAGIENASRENKKKIEQLLQDLSLWETFESKLKVKADKINIAKLKKEILEAKEHPYLDFKSWQKFERELRLVKNQDIITWMMCRDLMEENKVEGLDTGTLYLKDIRTDVQEQGSLNVLNHVKPMRLPVVVYRADSRGHVHKEQAPLATVYIEERDTKLLKQGNFKSFVKDRRLNGLFSFVDTGGLAMEQYPISKLRVEYELAKYQTARVCAFEQTLELEESLLTRYPHLPDKNFRKMLESWSDPLLAKWPELHEKVRLLIAVRNAFSHNQYPMYDEAVFSPIRKYDPSSPDAIEERMRLNIAHRLSEEVKQAKETVERIIQA

SEQ ID NO: 248 - protein, 1008 aa, Unknown; identical to SEQ ID NO: 60
  Description of Unknown: Cas13 sequence

SEQ ID NO: 249 - protein, 1003 aa, Unknown; identical to SEQ ID NO: 213
  Description of Unknown: Cas13 sequence

SEQ ID NO: 250 - protein, 1106 aa, Unknown; identical to SEQ ID NO: 241
  Description of Unknown: Cas13 sequence

SEQ ID NO: 251 - protein, 1095 aa, Unknown; identical to SEQ ID NO: 229
  Description of Unknown: Cas13 sequence

SEQ ID NO: 252 - protein, 1095 aa, Unknown; identical to SEQ ID NO: 229
  Description of Unknown: Cas13 sequence

SEQ ID NO: 253 - protein, 948 aa, Unknown; identical to SEQ ID NO: 239
  Description of Unknown: Cas13 sequence

SEQ ID NO: 254 - protein, 1095 aa, Unknown; identical to SEQ ID NO: 229
  Description of Unknown: Cas13 sequence

SEQ ID NO: 255 - protein, 1095 aa, Unknown; identical to SEQ ID NO: 229
  Description of Unknown: Cas13 sequence

SEQ ID NO: 256 - protein, 1095 aa, Unknown; identical to SEQ ID NO: 229
  Description of Unknown: Cas13 sequence

SEQ ID NO: 257 - protein, 1008 aa, Unknown; identical to SEQ ID NO: 60
  Description of Unknown: Cas13 sequence

SEQ ID NO: 258 - protein, 948 aa, Unknown; identical to SEQ ID NO: 239
  Description of Unknown: Cas13 sequence

SEQ ID NO: 259 - protein, 1095 aa, Unknown; identical to SEQ ID NO: 229
  Description of Unknown: Cas13 sequence

SEQ ID NO: 260 - protein, 1131 aa, Unknown
  Description of Unknown: Cas13 sequence
MTNTPKRRTLHRHPSYFGAFLNIARHNAFMIMEHLSTKYDMEDKNTLDEAQLPNAKLFGCLKKRYGKPDVTEGVSRDLRRYFPFLNYPLFLHLEKQQNAEQAATYDINPEDIEFTLKGFFRLLNQMRNNYSHYISNTDYGKFDKLPVQDIYEAAIFRLLDRGKHTKRFDVFESKHTRHLESNNSEYRPRSLANSPDHENTVAFVTCLFLERKYAFPFLSRLDCFRSTNDAAEGDPLIRKASHECYTMFCCRLPQPKLESSDILLDMVNELGRCPSALYNLLSEEDQARFHIKREEITGFEEDPDEELEQEIVLKRHSDRFPYFALRYFDDTEAFQTLRFDVYLGRWRTKPVYKKRIYGQERDRVLTQSIRTFTRLSRLLPIYENVKHDAVRQNEEDGKLVNPDVTSQFHKSWIQIESDDRAFLSDRIEHFSPHYNFGDQVIGLKFINPDRYAAIQNVFPKLPGEEKKDKDAKLVNETADAIISTHEIRSLFLYHYLSKKPISAGDERRFIQVDTETFIKQYIDTIKLFFEDIKSGELQPIADPPNYQKNEPLPYVRGDKEKTQEERAQYRERQKEIKERRKELNTLLQNRYGLSIQYIPSRLREYLLGYKKVPYEKLALQKLRAQRKEVKKRIKDIEKMRTPRVGEQATWLAEDIVFLTPPKMHTPERKTTKHPQKLNNDQFRIMQSSLAYFSVNKKAIKKFFQKETGIGLSNRETSHPFLYRIDVGRCRGILDFYTGYLKYKMDWLDDAIKKVDNRKHGKKEAKKYEKYLPSSIQHKTPLELDYTRLPVYLPRGLFKKAIVKALAAHADFQVEPEEDNVIFCLDQLLDGDTQDFYNWQRYYRSALTEKETDNQLVLAHPYAEQILGTIKTLEGKQKNNKLGNKAKQKIKDELIDLKRAKRRLLDREQYLRAVQAEDRALWLMIQERQKQKAEHEEIAFDQLDLKNITKILTESIDARLRIPDTKVDITDKLPLRRYGDLRRVAKDRRLVNLASYYHVAGLSEIPYDLVKKELEEYDRRRVAFFEHVYQFEKEVYDRYAAELRNENPKGESTYFSHWEYVAVAVKHSADTHFNELFKEKVMQLRNKFHHNEFPYFDWLLPEVEKASAALYADRVFDVAEGYYQKMRKLMRQ

SEQ ID NO: 261 - protein, 1131 aa, Unknown; identical to SEQ ID NO: 260
  Description of Unknown: Cas13 sequence

SEQ ID NO: 262 - protein, 1095 aa, Unknown; identical to SEQ ID NO: 229
  Description of Unknown: Cas13 sequence

SEQ ID NO: 263 - protein, 1095 aa, Unknown; identical to SEQ ID NO: 229
  Description of Unknown: Cas13 sequence

SEQ ID NO: 264 - protein, 1095 aa, Unknown; identical to SEQ ID NO: 229
  Description of Unknown: Cas13 sequence

SEQ ID NO: 265 - protein, 1115 aa, Unknown; identical to SEQ ID NO: 58
  Description of Unknown: Cas13 sequence

SEQ ID NO: 266 - protein, 1099 aa, Unknown
  Description of Unknown: Cas13 sequence
MEKPLPPNVYTLKHKFFWGAFLNIARHNAFITICHINEQLGLTTPPNDDKIADVVCGTWNNILNNDHDLLKKSQLTELILKHFPFLAAMCYHPPKKEGKKKGSQKEQQKEKEKEKENEAQSQAEALNPSELIKVLKTIVKQLRTLRNYYSHHSHKKPDTEKDIFKHLYKAFDASLRMVKEDYKAHFTVNLTRDFAHLNRKGKNKQDNPDFNRYRFEKDGFFTESGLLFFTNLFLDKRDAYWMLKKVSGFKASHKQREKMTTEVFCRSHILLPKLRLESRYDHNQMLLDMLSELSRCPKLLYEKLSEENKKHFQVEADGFLDEIEEEQNPFKDTLIRHQDRFPYFALRYLDLNESFKSIRFQVDLGTYHYCIYDKKIGDEQEKRHLTRTLLSFGRLQDFTEINRPQEWKALTKDLDYKETSNQPFISKTTPHYHITDNKIGFRLGTSKELYPSLEIKDGANRIAKYPYNSGFVAHAFISVHELLPLMFYQHLTGKSEDLLKETVRHIQRIYKDFEEERINTIEDLEKANQGRLPLGAFPKQMLGLLQNKQPDLSEKAKIKIEKLIAETKLLSHRLNTKLKSSPKLGKRREKLIKTGVLADWLVKDFMRFQPVAYDAQNQPIKSSKANSTEFWFIRRALALYGGEKNRLEGYFKQTNLIGNTNPHPFLNKFNWKACRNLVDFYQQYLEQREKFLEAIKNQPWEPYQYCLLLKIPKENRKNLVKGWEQGGISLPRGLFTEAIRETLSEDLMLSKPIRKEIKKHGRVGFISRAITLYFKEKYQDKHQSFYNLSYKLEAKAPLLKREEHYEYWQQNKPQSPTESQRLELHTSDRWKDYLLYKRWQHLEKKLRLYRNQDIMLWLMTLELTKNHFKELNLNYHQLKLENLAVNVQEADAKLNPLNQTLPMVLPVKVYPATAFGEVQYQETPIRTVYIREEHTKALKMGNFKALVKDRRLNGLFSFIKEENDTQKHPISQLRLRRELEIYQSLRVDAFKETLDLEEKLLKKHTSLSSLENKFRILLEEWKKEYAASSMVTDEHIAFIASVRNAFCHNQYPFYEEALHAPIPLFTVAQQTTEEKDGLGIAEALLRVLREYCEIVKSQI

SEQ ID NO: 267 - protein, 948 aa, Unknown; identical to SEQ ID NO: 239
  Description of Unknown: Cas13 sequence

SEQ ID NO: 268 - protein, 1099 aa, Unknown; identical to SEQ ID NO: 266
  Description of Unknown: Cas13 sequence

SEQ ID NO: 269 - protein, 1003 aa, Unknown; identical to SEQ ID NO: 193
  Description of Unknown: Cas13 sequence

SEQ ID NO: 270 - protein, 1095 aa, Unknown
  Description of Unknown: Cas13 sequence
MEKPLLPNVYTLKHKFFWGAFLNIARHNAFITICHINEQLGLKTPSNDDKIVDVVCETWNNILNNDHDLLKKSQLTELILKHFPFLTAMCYHPPKKEGKKKGHQKEQQKEKESEAQSQAEALNPSKLIEALEILVNQLHSLRNYYSHYKHKKPDAEKDIFKHLYKAFDASLRMVKEDYKAHFTVNLTRDFAHLNRKGKNKQDNPDFNRYRFEKDGFFTESGLLFFTNLFLDKRDAYWMLKKVSGFKASHKQREKMTTEVFCRSRILLPKLRLESRYDHNQMLLDMLSELSRCPKLLYEKLSEENKKHFQVEADGFLDEIEEEQNPFKDTLIRHQDRFPYFALRYLDLNESFKSIRFQVDLGTYHYCIYDKKIGDEQEKRHLTRTLLSFGRLQDFTEINRPQEWKALTKDLDYKETSNQPFISKTTPHYHITDNKIGFRLGTSKELYPSLEIKDGANRIAKYPYNSGFVAHAFISVHELLPLMFYQHLTGKSEDLLKETVRHIQRIYKDFEEERINTIEDLEKANQGRLPLGAFPKQMLGLLQNKQPDLSEKAKIKIEKLIAETKLLSHRLNTKLKSSPKLGKRREKLIKTGVLADWLVKDFMRFQPVAYDAQNQPIKSSKANSTEFWFIRRALALYGGEKNRLEGYFKQTNLIGNTNPHPFLNKFNWKACRNLVDFYQQYLEQREKFLEAIKNQPWEPYQYCLLLKIPKENRKNLVKDWEQGGISLPRGLFTEAIRETLSEDLMLSKPIRKEIKKHGRVGFISRAITLYFKEKYQDKHQSFYNLSYKLEAKAPLLKREEHYEYWQQNKPQSPTESQRLELHTSDRWKDYLLYKRWQHLEKKLRLYRNQDVMLWLMTLELTKNHFKELNLNYHQLKLENLAVNVQEADAKLNPLNQTLPMVLPVKVYPATAFGEVQYHKTPIRTVYIREEHTKALKMGNFKALVKDRRLNGLFSFIKEENDTQKHPISQLRLRRELEIYQSLRVDAFKETLSLEEKLLNKHTSLSSLENEFRALLEEWKKEYAASSMVTDEHIAFIASVRNAFCHNQYPFYKEALHAPIPLFTVAQPTTEEKDGLGIAEALLKVLREYCEIVKSQI

SEQ ID NO: 271 - protein, 1106 aa, Unknown; identical to SEQ ID NO: 241
  Description of Unknown: Cas13 sequence

SEQ ID NO: 272 - protein, 1095 aa, Unknown; identical to SEQ ID NO: 229
  Description of Unknown: Cas13 sequence

SEQ ID NO: 273 - protein, 1095 aa, Unknown; identical to SEQ ID NO: 229
  Description of Unknown: Cas13 sequence

SEQ ID NO: 274 - protein, 1335 aa, Unknown
  Description of Unknown: Cas12a sequence
MKSLAQFQNLYALQKTLRFELKPEGHTRETFNRWLEEIEKEQASENENIVYQDLLRAKKYEKIKIILDEYHKDFIEQALAYANLTELEKYEELYRKSNRTSEEEEEFENTKESLRKQIANIFIKNPNKTVQERWKFLFSKKLIQNELIVWVKGNYELLSEKLKNEFPDESSIISTIEDFKYFTTYFRNYHENRKNLYSNEDKFSTIAHRLIHENLPKFIDNIAIYQKAKAVLNINEVEKELGLPEDTLDKIFSLDFFSKALTQKGIDQYNYFLGGKTENEVKKIKGLNEFINLYNQQQQDKNQRLPFLKVLYKLPLFERTSTSFRFEPIENDRDLIERIGKFYYNDLKQYRDDSQGDTTDILSGINTLLRHVHDYRDGLYVNGGITLTQISQKIFGSWSYINNALAYFYDTYIDASGVDHQGERKPKKQKQIQEKTKWLKQKQFPVILVEKALSEYKSIETNEDLKTRISDTTLCDFFKRCGNDDNGQDLFDRIEARLREKNEEGYSLEDLLKKEFTTERKLMQDKTKTLLIKNFLDVIQGDKDDITAGLLHFVKCLIPRTEISEKNELFYSGMEKYLNILSEVTPLYNKARNYLTQKPYSIEKVKLNFENSTLLDGWDENEESDNSCVLLRKRGYYYLGIMNKKHNMIFDRKIYPKATEGEAYYEKMIYKLLPGAYKMLPKVFFSEKNIDYFKPSEEILRIRNTASYSKNGQPQEGYQKASFSIEDCRKYIDFFKKCIANHWDWQKFNFNFSPTEYYQSIDEFYREIERQGYKIDFVKIPESYINQLIKENKLYLFKIYNKDFSEKKKSKGKDNLHTLYWKMLFDEKNLKDVVLKLNGEAEVFFRQKSILYNEEIWNKGHHYSELKDRFSYPIISNKRYAEDKFFLHVPITLNFKADGINNVNNMVNEFIKDNRDIHIIGIDRGERHLLYVSVINQKGDIVEQCSLNEIVTEYNGKIFKKNYHEELDNLEKERDRARKDWQTIANIKELKEGYLSHVIHKISKLILKYNAIVVMEDLNSGFKRGRQKVEKQVYQNFEKQLIEKLNYLVLKESNVDEPGGVLRAYQLANKFETFKKLGKQSGIIFYVPAAYTSAIDPVTGYIQYLYPLKQADSVEKARKFYSQFKRISYNPHKQWFEFSFDYNDFNIIYHGKSSWTICTTNTERYMWNRLLNNGHGGEELVYVTNELELLFGEYNIIYGDGKDIKQQITDVQDIDVDRTAKQFYKRINELLNLTLKLRHNNGKKGADEEDYILSPVEPYFDSRFESRKPSMQQTLPINADANGAFNIARKGLLLLERLNQLGVEEFEKTKKSNNKKTQWLPHELWVEYAQNHTRK

SEQ ID NO: 275 - protein, 1273 aa, Unknown
  Description of Unknown: Cas12a sequence
MQDKTGWSSFTNKYSLSKTLRFELKPVGNTQKMLEDDGVFQKDRERQENYKKVKPFMDKLHREFIKEALNNLKLEGLTEYFEIFKKFRKDKNNKELKNAEKKLRQIIGRCYTETAQIWVEKYKEFGFKKKNIGFLFEEGVFELMKLKYGNDEASQIEKNGEVLSIFDGWKGFLGYFKKFFETRNNFYKDDGTSTAVSTRIINENLKIYLDNLIKYNKIKDKVDFKEADILQENKLNLSDFFNVESYAKYSLQKGIDYYNEILGGKTLKNGTKLKGLNEVINEYKQKNKSGELSKFKMLKKQILGEGEDRTLFEEIENEDELKDVLKDFFYNADPKITLFKTLLEDFFSNTEKYKDELDKIYFNTVAINGILHRWVDDSGVFQKYLFEVLKSNKLVKSNHYDKKEDSYKFPDFISFEHIKVALENCERDGLKDKFWKEKYYTKECLTENGLANLWQEFLEIYKCEFKKLYDYKTDDNDCYLQYRDNYKKYILDANFNPKEKSAKDIIKDYLDSVLSIYQLAKYFALEKKKVWTTDYETGDFYYEYIKFYEDTYEQIIKPYNLVRNYLTRKPINTAKKWKLNFDNAYLASGWDKDKEVSNLTVILRRDEQYYLAIMKKGKNKIFEKKFSCGEFEKMEYKQIAEASSDIHNLVLMNDGSCRRCIKMHDKRKYWPLDISIIKEKKSYAKENFVRRDFERFVNYMKKCSLLYWKEYDLKFSDTSTYKNINDFTNEIASQGYKLSFSAIPESYINEKNNNGELYLFQIYNKDFGIKTEGNKNLHTMYWESIFSEENRFRNFIVKLNGKAEIFYRPKSEQVEKEQRNFTREIIKNRRYTENKIYFHCPITLNRISRENVKKFNNGINNYIATNPNINILGVDRGEKHLVYYAIVDQDGKLIDAEDATGSFNTIGSTDYHRLLEEKAKDREKERKDWDLIRGIKDLKKGYISLVVRKIADLAIKYNAIIIFEDLNTRFKQIRGGMEKSVYQQLEKALINKLSFLVNKGEKDPEQAGHLLKAYQLAAPFQTFDKMGRQTGIIFYTQASYTSKIDPITGWRPNLYLKYRNIDDSKESIKKFKSILFNKEKNRFEFTYDLKDFVDFEEDKIPEKTEWTLCSSVERHKWNRHMNNNKGGYEVYKDLTENFYKLFDENNISMNKDIVDQVESISNGNFFRQFIYLFNLVCQIRNTDEKAEDVDKRDFILSPVEPFFDSRRAKDFKAYGDNLPKNGDENGAYNIARKGVLIIKKIKEYYNQNGSCDKLGWGDLSISHKEWDDFATNN

SEQ ID NO: 276 - protein, 1301 aa, Unknown; identical to SEQ ID NO: 11
  Description of Unknown: Cas12a sequence

SEQ ID NO: 277 - protein, 1188 aa, Unknown
  Description of Unknown: Cas12b sequence
MCVSRLPWFNITLTGKLNRQRLNQMCVSRLPWFCTPKGQLAATPKTVVAQQENAMLAIIRDVHEAAPADLKTVAQRLEPGYFVTQFPKQQMTGDEARAEAERLFAACQKKFKELAEYEDGYRQCLDALGPNLSLPRLGRKPKGAYPYAVVFKLMPTNATWECFKRVTASLYKRAQKGVVSPVSADSIADVRTNDEPLFEYFTNLALVRPPGNKDRAVWFEFDLAAFIEAIKSPHQFFQDTIKREQAVAQIKAKLDAMDGQGRAASGEEDALPGFEGDDRITLLRELVTDTLGYLAEADASTSPGGKIEYSIQERTVRGFAEVKRRWRDLVEKGKATEDALLKVLAEEQTEHRDDFGSATLYRELAKPKFQPIWRDPGTQPWHADDPLRAWLEYRELGRELEDKQRPIRFTPVHPVHSPRFFIFPKKKGGGRFGTVHEPGQLRVMAGIVAQTQHGWEPVPVRITYAAPRLRRDQLRDDVETDLESRPWLQPMMQALGLPEPDTADFSNCRVTLQPSAPDDIQLTFPVDVSADKLTTAIGKAARWAKQFNLFPDGDNFYNASLRWPHEKKPSKPPVPWHEALDNFSVLAADLGQRCAGAFARLEVRANDDFAGKPSRFIGETPGKKWRAALVAAGMLRLPGEEQTVWRPGATGPNFHTELSGSRGRMARPHEADDTADLLRAFDCPEESLMPADWRTSLSFPEQNDKLLVAARRYQSRLARLHRWCWFLTDEKKRQTALDEIREAEDMPAADDPQLTDKLRALLLQKQAALPGLLVRLANRILPLRGRSWQWETHPDKADCHLLTQTGPALPDVWIRGQRGLSMQRIEQIEELRRRFQSLNQMQRREIGGKPPIRRDDSIPDCCPDLLDKLDQIKEQRANQAAHMILAEALGLRLAPPPADKRQLRASRDVHGQYVKSREPVDFIVIEDLSRYRSSQGRAPRENSRLMKWCHRAVRDKLRELCEPFGIPVVETPAAYSSRFCSRSGVAGFRAVEVGPGFDREFPWMMLKDREDEGEPVRQLILQVATLNQGRDGKPPRTLLAPLAGGPIFVPIVDKLNGADIQPALAQADINAAINLGLRAIADPRLWSIHPRCRTQRQGDQMLTREKRKFGETGQPLAVHRADGVKPDDTRNPNFFADISGSLPAWESATLDGQHLLSGRCLRSEIKKRQWQRCAEINDRRMNRWMKGE

SEQ ID NO: 278 - protein, 1518 aa, Unknown
  Description of Unknown: Cas12b sequence
MTELQTQRAYTLRLKGIDEKDQSWRDALWKTHEAVNKGAKVFGDWLLTLRGGLDHTLADAEIPGEKGKPDRAPTQEERKHRRILLALSWLSVESERGAPEEFIVATGKEPAATRNDKVIAALKDILRGRNLTEEKISEWTEVCTPSLSAAIREDAVWVNRSRAFDEAVKRIGSSLTREEVWDMLECFFGSRNAYLAPVKISEDESSDGEQEEKAKDLVQKAGQWLSSRFGTGEGADFAKMAAVYAKIAAWAGNAQAGTTGNEVINNLATALREFTPKSNDLKGVLDLISGPGYKSATRNLLKQIANTKTVTREDISKLQETAGEDSEECATKTGSKGKRAYADAILKDVESVCGFTYRIDKDGQPVSVADYSKYDEDYKWGSSRHKEFAVMLDHAARRVSLAHTWIKRAEAERRKFEEDSKKIMQVPQAAKDWLDAYCAQRSEASGALEPYRIRKRAIQGWKEIIASWNKPDCKTAEDRIAAARQLQDDPEIEKFGDIQLFEALAEDDAQCVWKKEDGTLDPEILINYTLASEAMFKKQHFKVPSYRHPDAFLYPVFCDFGNSRWELDFSIREAATKLKEIEAKIEKQRQEVHKVQQALEKCENDEKRPKMEERLKEAQKKLQESQNYGEYLHSNNKITMVLFDGTFVKKHIFAWQSKRLTKDLALYQEPSADPKNVVSRADRLGRAVASVGINDAVKVAGLFEQENWNGRLQAPRQQLEAIAQYVEKHGWDNKAEKMRASIKWFITFSAKLQSKGPWNEFARKHGLKEDPHYWPHAEKNENRTAHSRLILSRLPGLRVLSVDLGHRYAAACAVWEALGSEAFKKDIEGKRIIRGDTDENALYCHTEHEANGKKHITIYRRIGADTLPDGAHHPAPWARLDRQFLIKLQGEDEQAREASNEEIWKVHQLENTLGRRTPLIDRLIAGGWGYTEKQKARLEVLTNLGWCPTNKTDNQEEGDEEETAILSKPSLLVDDLMFSAVRTLRLALKRHGDRARIAHYLITDEKTKPGGVKEKLDKNGRVELLLDALGLWHDLFSSPGWHDEKAKQLWNAYIAGLLPEGELQQAKSVTTSAALGGQQKKEKKEKLRAVAEALYLNSDLCHSLNEVWRKRWEEDDKQWRIYIRWFKDWIMPRGANAKSPAIRHVGGLSLTRLATLTEFRRKVQVGFFTRLHPDGTKTETREDFGQKTLDTLEHLREQRVKQLASRIVEAALGIGSEDKRHWDGKKRPRQRIADPRFVPCHAVVIENLTHYRPEETRTRRENRQIMEWASSKVKKYLSEICQLHGLHLREVSAAYTSHQDSRTGAPGIRCQDVSLIEFMKSPFWRKQVAQAEKKQKEGKGDAVERYLCELNQKWKGASEEEWRKAGFVRIPLRGGEIFVSAAGHDSPAAKGIHADLNAAANIGLRALLDPDWSGKWWYVPCNSSTMCPARDKVTGSAAVNPGQPLQVSAQLESDDAAKDTKKRKKKGDGKSKEIINLWRDISSYPLEDTRGGTWSNKTVYWNRVQSNVVHILQNQMKG

SEQ ID NO: 279 - protein, 1374 aa, Unknown
  Description of Unknown: Cas12b sequence
MPETTQRAYTLRLQGHDPKDASWREALWKTHEAVNRGAKAFGDWLLTLRGGLDHSLADEGAPGQTPTEEQRKQRRILLALSWLSVESENGAPQEYIVPHDRDNESGARQNWKTREALREILKNRGCRDDEIESWCHDCEPSLTSAIRKDAVWVNRSKAFDNAVQSIPNFSREEIWDLLGCFFVSSQAYLAPLESPKDDKPDASKKDSSKDLIQSAGQWLSRRFGRGKGLNFARLAETYEAIARWASVANPGDTNDLIADLAKTLNAETPELDGILKVVSGPGHKSKTRNLLRSLSAVNHITKDTLQRLKDTANEDAKKAKLKKGEKGHRAYAYKVLEAVEDACGFTYLQEGDRAKHCEFAVMLDHAARRVSSLHTWIKRAEAERRRFEIDTKKKDQLPPSVKEWLDTYCQKRSKETGAVEPYRIRRGAIEGWKEIVEAWSKAGTTTAEDRKHEARRLPDNPHIDKSGDIKLFEDLALEDALPVWHANGDPNNPPDPQLLIDYVEGSEAEFKKRAFKVPTYCHPDPLVHPVFCDYGCSRWNVSFAIQPVKKQKLSSEEKLPAKGLLLDLLHGTAIRPVALRWQSKRFARDLALNTTDSSDKPNEVTRADRFGCALAKCPSSQKIRIRGLFEEKYWNGRLQAPRPELTALAKRVAKYGWDKKARKLRNSLNWFITFSANLRPSGPWEEYTKYAEKAFSSNASAKPSVSRGGFWVVHASPNKRGKMAQLRLCRLPELRVLSVDLGHRYAAACAVWETLSKSAFEQEIHERKILRGGTGPNDLFCHTQHDTNGQSKVTIYRRIGADTLPNGTPHPAPWARLDRQFLIKLPGEEREARKASPTELANVEKLEKELGLKTSENRVKRIDDLMSDTLRTVRQALRRHSLRARIAFNLATLRDQSDGDEESQSKQKRDTRWNNTVKIWHSLLESNEWTDDWAKALWDELGPLSDPQKADDAEWLKLAAEKFYTRWQEDEQTWRERLRWLRRWILPRGSQAASQKGSIRHVGGLSLTRLATIKTLYQVLKAYHMRLKPDNSRKNIPAEGDEALQNFGQKILDDLEHMREQRVKQLASRIVEAALGLGRMKQVTIGKDPKRPREPVDQSCHAVVIENLTHYRPEKRQTRRENRQLMDWSAAKVKKYLKECCQLHGLHLVEVSASYTSRQDSRTGAPGIRCQEVPLTDFLKKNFWREQVKQAKQRLSEGKANARDRYLCQLNERWGNAPAPVTQTAIRLRIPLNGGELFVSADQNSPASKGIQADLNAAANIGLRAITDPDWPGAWWYVPCEANTFKPVKDKVAGSAAIDSNVSLKKDSPNSEKPASDRKSRTSKSMINLWCDTSSKSLSEKDQWQESAPYWEDVAARTINILQASLACSTTNSQ

SEQ ID NO: 280 - protein, 1335 aa, Unknown; identical to SEQ ID NO: 274
  Description of Unknown: Cas12a sequence

SEQ ID NO: 281 - protein, 1520 aa, Unknown
  Description of Unknown: Cas12b sequence
MAYQNGKEQPTVTNQRAYTLRLSGTNDQDSIWRNRLWHTHEAVNKGAKTFGDWLLTMRGGLCHTLAEADVPGKGNKPARHPTPQEIRSRRVVLALSWLSVESQHGAPERHLVSHDLDIATGERKNWKTVEALREILHGRCLCKELIDEWANDCRDSLSATIREDAVWVNRSKAFDLAAKKIGASLTREELWDFLQPFFANKHGYLQMDTVAGVTNGDSETDAEEAKEDSSEEKAKDLSQKAGQWLSSRFGTGTGADFSRFSKVYEVLAARCGSVAVGVSGVEAIRILAGTLADFSPGSNDIEGMLGLMSGPGYKSATRNILQKINTLQTVSQQDLDRLREASEKDALQSKQKVGGKGSRPYANAILQDVEAACGICYAGTGESPARHWQYAVILDHAARRVSMAHSWIKRAEEQRSKFEIEKDKLDHVPKDALAWLDAFCARRSSESGASDAYRIRRSAVDGWKQVVAAWAALPPKPENQGSELLSDAESARIQAARELQDTVEKFGDIQLFEALSLTGAKCVWQPDGRPDAQPLLDYVAGTDAISKKQRFKVPAYRHPDALLHPVFCDFGNSRWNINYAIHRAPEKLTPAQQLLEKKKAEIDKAELTLAKAGDAAKQANISEKINGLRAAFIQQQEKVAWLNSRHAMTMSLWDGTHIEDTPLIWQSKRFGSDIGQPVEAQPLPVSRADRFGRAVALAQDNVPVIPSGLFDLSDWNGRLQAPRRQLEAIAAIRDSAKLSVNEKQQLVAKRIQSIRWLLTFSAKLQSHGPFIAYAAQHGFDWRYGAHGPENKSRQGLAKLILCRLPGLRILSVDLGHRYAAACAVWETLNAGQIQKACLDAGKEAPGPCTLYLHLKQIANGKEKKTIFRRIAADTLPDGSPHPAPWARLDRQFLIKLQGEDRDARLATSEEIAAVEQMENELGVVRQLKRKGRELLVDELMSDALRTLRLGLRRHGVRARIAFNLTANKRIRPGGKEEVLDQEGRVLLLTETLLAWYELYTAERWTDEPARELWNRHIQPLLGATILQNTVNQEDTPSAAKRRKLREETSGKLKHVAEEIAKNDSLCRQLHVLWSAQWQTEDVIWRTRLRMMRRWLLPRGVKRNAQLRISIRDVGGLSLTRIASFKSLYQVQKAYQMRPHPEDPRLNIPERGDSRLENFGQRVLDAMERMRENRVKQLASRIAEAALGIGGETGISSKDGSQKKRPTERSSDPRFAPCHAVVIEDLTHYRPDETQTRRENRQLMSWSSSKVKKYLGEACELNGLYLREVSPAYTSRQDSRTGAPGLRCNDVTVVEFNNSPFWRKQVGAAEKNQKEGNKGDARERYLLSIEEGIRGAANDRDIFRIPVKGGEIFVSACITDGGNNAKKNAPPGLQADLNAAANIGLRAIFDPDWEGRWWYIPCDAATLCPDAKKFIGCKAVDPTKPLRVVAEEGAISASGIGSKKSGRKKNAATDGTRIVNLWRDPSGAPIHRDVLRSPEWQDYAGYWNEVQHRVIRNLKTCYEQTSQQEDPFVSQDADKPF

SEQ ID NO: 282 - protein, 1180 aa, Unknown
  Description of Unknown: Cas12b sequence
MKRLAETALADKVKCETNSRPKGERAYANSILHDVESACGFTYRVDKGEQPVPVSDYSHYANDYRWGPANHSEFAVMLDHAARRVSLAHTWIKRAEAERRQFEENAKKIDKVPKVAREWLDSLCAERSIVLGALEPYRIRRRAVDGWKHVVAAWSKSDCKTAQDRITAARLLQEDPEIDKFGDIQLFEALAEDHAVCVWQRDGEAGKTSDPQLLIDYALAAEAEFKKRHFKVPAYRHPEAFWHPVFCDFGQSRWKICFDVHKNRQSRRQRACANRISRKICFDVHKKRQTLRLSLEVWTGSKMLDMPLCWQCKRLARDLALGQDHKKDRSCQVTRADRLGRAVSNVARNQEVQILGLFEQEYWNGRLQAPRPQLEALGRYIEKHGWDAKAQKSCRAIRWMISFSPRLQPAGPWGKFAEKLQLNPNPKYWPHAEDNKDRGSRSKLILCRLPGLRVLSVDLGHRYAAACAVWEAVDAEQVKEACQAAGHREPNENDLYLHLKKRTTKQKKGSQGVVEETTIYRRIGADTLPDCTPHPAPWARLDRQFLIRLQGEEDEARAASNEEVWAVHKLEAELGRTIPLIDRLLGAGWGQTEKQKARLKALRELGWTPANKCQAFNSTDETELRRPSLAVDELMLDAVGTLRLALKRHGDRARIARYLITDERTKPGGVKEKLDENGRIELLQDALIIWHGLFSSPRWRDDAAKQLWNEHIAKLVGEQNLVEVSEDASGSERRTKQKQNREKLREAAKALVDDVALRQALHDMWKRRWEEEDREWRRRLRWFKDWVLPRREQARKAYSRPAETGSSSHPKRRARYAAIRRVGGLSLTRLATLTEFRRKVQVGFFTRLKPDGTKAEAKEGFGQSTLDALEHLRAQRVKQLASRIVEAALGVGRIRRFPGVKNPKRPDTPVDKPCHAIVIENLTHYRPEETRTRRENRQLMTWSSSKIKKYLAEACQLYGLHLREVTAAYTSRQDSRTGAPGLRCQDVPVKEFMRSLFWRKEVAQAEKKLTAGKGSSYERLLCELNQRWKDNSPGDGKRAELLRLPHKGGEIFVSAAPDSPAARGLQADLNAAANIGLRALTDPDWPGKWWHVPCNAVTFRPVEDKVKGSAAVKLDQSLRQVAHPQSKDPGAKKSKEIVNLWCDISSLPLEHREWKLDWEPYPAYWNNVQCRVIRVLQGKV

SEQ ID NO: 283 - protein, 1546 aa, Unknown
  Description of Unknown: Cas12b sequence
MANAKVKTTTRSYTLSLNAPSDTTDRSPLWHRIFRTHYAICCGAREFGKLLLDLRGGLPTSLAQLGEGIAENDRRQTQRGTRRILALGWLSVEDLDHARNDPHRVQDTAPGSPLDQDLAEKILRKILITKGIKSEEEQSNWISDCLPALTANIRPDAVWVNRAESFAQWQRGTQPGAQPPTPEEAQQILFSLCGESLVTLTLPEQPAAAGQKQPDQETSPDPEEQTDRPPAAPSADDEMDPSNASRGIFGDLFGENAEGKRSRSQGKDNFACAVRDFLCANPTPSADAITEFREKQKPREPNPPGPEKYPPEVSTSGAPTAVAKRYRKLLVCAGLWPKSADEDGSSRNSAKTKFADPKEPQKTEIQINALDLIDACNQAAPADDSGTSPKAGRVFAPAWASNIAEKVASATQMPANAKSLNEFKRLMFALAARRFSQTQSWTRRNEAERHMAAARQDAAVARLREIDPDHKAQDWLRGYEQRRADQSGSNGEFRITRRMIGEAEAVFKAWAGTNSAAERELKTVAVQTTAEKFGDAALYSEIARNTAAEAVWRSGSAPEILDQWVKLRKAQSDQQRTRVPRFCHPNAFRHPTWCEFGESSKPGVWYAWNPKSKPRKPEVGGEGDGTRRLWVLLPDFNSGIGQAVPLRWRSKRLSKDLGEALQPSDAPIPRADRVSIAAAGLNLEGANGVPARYRPSLPFSENTKGWNARLQANRTALLHLESKWDAEAATWRDGGRSLLALKWFTTFSPELAMSEGPGRAIHPKLGWNSEPHSDLNRAQKRGGNAKLILSRLPGLRVLSVDLGHRYAAACAVWETLTTEQMNAACQAKNHTQPAESDMYVHLAHPTERVVKSGRKKGQNLIQTTVYRRIAADTLPDGTPHPAPWGRLDRQFLIKLQGEQRPTRAASKNEADLANALFHRLGLRSDADSENKSRAVDKLMARTVRVATLGLKRHARRAKIAYALDPNTKAIPGMGGSSAAFTPGDEPHIHLLTDALFDWQSLATDAKWDDAHARSLWNHHIATLPGGFHLENPTPRDESAHEPSRQRQRSGDDALRATLKPIAEKLSKADRQEVHAAWKKYWGDSDGQSAIVPKVLQGQRGPEKTTPSASASGWHGKIRWITDWIMGKYLEGCTGHAWKHDVGGLSVSRITTMKSLYQLHKAFAMRATPEKPRGAPEKGESNLGAAQGILTAMESMRQQRVKQLASRIAEAALGAGIERRSDNGRELQRPRERVDDPRFAACHAVVVEDLTNYRPDEMQTRRENRQLMQWASSKVKKYLSEACQLHGLYLRGVPAGYTSRQDSRTGAPGVRCGDIPVEELMAAPRWRRQILTAEKTRRENNTGTARDRYILTLDEKYRLLTAEQRKKTPPARIPVKGGDLFVSADPDSPAASGIQADLNAAANIGLKALIDPDWPGRWWYIPCDATTHKPSPERTRGSAAVDCDVPLGPDSTGTPEDRDAKPKKNQRNSKIAGRGQSAIINLWRDPTHLPIKENPSAWCESKKYWNQVEHNVVKVIESKGQKLTQTAEAATGESASSPPIAPTDVPW

SEQ ID NO: 284 - DNA, 91 bp, Artificial Sequence
  Description of Artificial Sequence: Synthetic oligonucleotide
agtgtctttgcaggaaagaacacagatcttgagggtcacaactcccatgtaggcggagactgcaacccctatagtgagtcgtattaatttc

SEQ ID NO: 285 - DNA, 91 bp, Artificial Sequence
  Description of Artificial Sequence: Synthetic oligonucleotide
agtgtctttgcaggaaagaacacagatcttgagggttgcagtctccgcctacatgggagttgtgacccctatagtgagtcgtattaatttc

SEQ ID NO: 286 - DNA, 91 bp, Artificial Sequence
  Description of Artificial Sequence: Synthetic oligonucleotide
tctttgcaggaaagaacacagatcttgaggggtgtagttcccctcaatttggggatgaacgtcgacccctatagtgagtcgtattaatttc

SEQ ID NO: 287 - DNA, 91 bp, Artificial Sequence
  Description of Artificial Sequence: Synthetic oligonucleotide
tctttgcaggaaagaacacagatcttgagggtcgacgttcatccccaaattgaggggaactacaccccctatagtgagtcgtattaatttc

SEQ ID NO: 288 - DNA, 136 bp, Artificial Sequence
  Description of Artificial Sequence: Synthetic polynucleotide
ttgtgagcggataaacacaggtgccacttctcagatttgagaagctcaacgggctttgccacctggaaagtggccattggcacacccgttgaaaaattctgtcctctagacccctatagtgagtcgtattaatttc

SEQ ID NO: 289 - DNA, 82 bp, Artificial Sequence
  Description of Artificial Sequence: Synthetic oligonucleotide
ttccggctcgtatgttgtgtggaattgtgagcggagtgccacttctcagaccgctcgccctatagtgagtcgtattaatttc

SEQ ID NO: 290 - DNA, 113 bp, Artificial Sequence
  Description of Artificial Sequence: Synthetic polynucleotide
cgagcggtcatcttgaagccaacggggtgtttgctcttggaaagagcacattggcacttcccgttgtcctcgccgtcctatagacgacccctatagtgagtcgtattaatttc

SEQ ID NO: 291 - DNA, 60 bp, Artificial Sequence
  Description of Artificial Sequence: Synthetic oligonucleotide
aattgtgagcggataaacacaggtgctaatgcctcccctatagtgagtcgtattaatttc

SEQ ID NO: 292 - DNA, 105 bp, Artificial Sequence
  Description of Artificial Sequence: Synthetic polynucleotide
gagacatcgtccagcaataggagtttctcacaccctgcagcacttatagctagacggttgtcctgaccaaaagacagaacccctatagtgagtcgtattaatttc

SEQ ID NO: 293 - DNA, 84 bp, Artificial Sequence
  Description of Artificial Sequence: Synthetic oligonucleotide
atggtcatagctgtttcctgtgtttatccgctcagtgctaatcacatttaattcatctaccctatagtgagtcgtattaatttc

SEQ ID NO: 294 - DNA, 105 bp, Artificial Sequence
  Description of Artificial Sequence: Synthetic polynucleotide
gataaataatgtaatcctgtggttgaatggattttttccatccttagcacacgcacagtattctttgccctttaggcaaaccctatagtgagtcgtattaatttc

1. A detection method comprising steps of:
contacting a CRISPR-Cas complex comprising:
a Cas protein with collateral cleavage activity that is thermostable at temperatures above at least 60-65° C.; and
a guide RNA selected or engineered to be complementary to a target sequence; with
a sample potentially comprising a nucleic acid of the target sequence.

2. The method of claim 1, wherein the step of contacting comprises contacting the CRISRP-Cas complex and sample with a reporter susceptible to cleavage by the Cas protein collateral activity.

3. The method of claim 1, wherein the step of contacting comprises incubating for a period of time above the temperature.

4. The method of claim 1, further comprising a step of amplifying nucleic acid present in the sample.

5. The method of claim 4, wherein the step of amplifying utilizes a thermostable nucleic acid polymerase.

6. The method of claim 4, wherein the steps of amplifying and contacting are performed in a single vessel.

7. The method of claim 1, wherein the Cas protein is a Cas12 protein.

8. The method of claim 7, wherein the Cas protein has an amino acid sequence that is at least 80% identical to that of SEQ ID NO: 15.

9. The method of claim 7, wherein the Cas protein has an amino acid sequence having at least 80%, sequence identity to any one of SEQ ID Nos. 3-21, 33-47, 51-56, 68-178, and 274-283.

10. The method of claim 1, wherein the Cas protein has an amino acid sequence having 80%, sequence identity to any one of SEQ ID Nos. 1-283.

11. In a method of performing a detection assay utilizing a Cas protein with collateral cleavage activity, the improvement that comprises utilizing a Cas protein with thermostable collateral cleavage activity.

12. The improvement of claim 11, wherein the Cas protein is a Cas12 protein.

13. The improvement of claim 12, wherein the Cas protein has an amino acid sequence that is at least 80% identical to that of SEQ ID NO: 15.

14. The improvement of claim 12, wherein the Cas protein has an amino acid sequence having at least 80%, sequence identity to any one of SEQ ID Nos. 3-21, 33-47, 51-56, 68-178, and 274-283.

15. The improvement of claim 11, wherein a method of performing a detection assay is conducted in a single reaction vessel.

16. The improvement of claim 11, wherein the thermostable collateral cleavage activity is thermostable above a temperature of about 60° C.

17. The improvement of claim 11, wherein the thermostable collateral cleavage activity is thermostable above a temperature of about 65° C.

18. The improvement of claim 11, wherein the Cas protein has an amino acid sequence having at least 80% sequence identity to any one of SEQ ID Nos. 1-283.
